United States Patent Application Publication US 2019/0183130 A1 - sequence listing, part 6

SEQ ID NO: 1 - DNA, 19352526 bp, Cryptococcus macerans (residues 9,676,266-11,611,518 of 19,352,526)
ggacacggcgagctcatgctggccgagttcaagtacggcggcgtgcccgacgagacgttcgccaagtttggcttcgaccaggccgtccccaaccggtacgtcgagctgcattcccgcccttactcgcgcctctcgcgcacgataacgttcttcattgaccccttcggttctttcagtctcttctaccatctcaagaaagatgctttcccatacctctactttaactatatgactcagggccagtggtatggcaagaagggcctatttgcgccgcgttttgaggagccctcgcagtagcggccgcggcgcctgacttatctagatgattatggcactagcaaatcctttgctgaagagattgggacgaagacgggtgggcgcaattggtgcctggtcgatgagtacggcggcggcggccctggcggcgaggtccgaccgtcgttacttcgtgccctgctttgaccctgacctcgcccagcccagctcccctcgcccttgtctcgcatcaagcaagccggcctacccttggacagcgtgccccgtctcgaccacctcgacggagtactcgagggccgagcacggcgccggacgcgggctcgaggcagcatcaacacgacgccgcgagctccctcgggctgagccttcccagccgttgcctcagtcgccctcctggcccttgctcgtctcgaccatgccgatccatccgatacctcggcgggttctctgcgttgccgagaaaccctcgatcgccaaagagatcagccgcatcatgtcgtccggtcagtctcattcggtgagtcggtcctcctttcggcggcggcgagcgggggcctcttgcaccgctggctcgctcgactccaggcacttgacctcgcctactcgtgatcggtgctgatgcctgatcaaattgctgcctgcaacggtagagcgcgatccagggcaacgtctacgtcaagaacatcacgttcgagtacaagctgccgccgcacccgcagccgatccccttcacggtgacatctgtcctcggccacgtcaatgcctcagactttggcgagcgccacaagggctggcggtcatgcgatccgttcgacctctttgacgccgagatcatcgagtcggtcggcgacgtgcgtccctcagtcagctcgaggcgaggggcgagagctcgcgcgcagccgcccgctcgaacctccggctgacctcgcactcgccctgcacctcgcctccgcccgcagaagatgaagggcgttgttgacaacctcgtccggcaggcccggaaccacgacctactcctcatctggaccgactgcgaccgcgagggcgagcacatcggctccgagatcatgcgccactgccagcgcggcaacccacgcatcaaggtcctccgctcgcgcttcagcgccatcatccctgcgtgcgtcggccctgtcatcagccctggccgtgctaccctcactgagatgctgcctgtggctacccaccattccagccagattcacaacgcggcgcgcaacccggtcgccctcgacatgctctcggccgccgctgtcgaagcccggcaggagctcgatctccgcactggggcggccatcacccgcatgcaaacgctcgcccttcaggcagcctttcccgagctcgacaagaaggtcatcagctatggtgcgccggacctacctgtgcgagcgcggccgagacaaccactgaccacccctcgcatctcacaggcccgtgccagttcccgacgctcggcttcgtcgtcgctcgctacctcgagatccaggcctttgtcagcgagaccttctggtacatctacgtctcgcaggagcgcgacgacgaccaggtcgtcttcaagtgggcgcggaaccacctctttgactttgaggcgagcgtcatcctctacgagcagtgcgtcgagcacccgcaggccgaggtcctcagcgtcgagaacaagccgaccaagaagtggttcgtagacgtcgactgctttctcgcgcagatggtgccctccgctgatcgccgcccgctctctacttacaggaagcctttgccgttgacgacggtcgagctacagaaggctggctcgcgtctactccatatgtcgcccaagagggtattggaggtcagtcggccctgacaggctgggtcctgcaacgccgaatccaacggctgacataccctacccttcgcagcatgctgagaagctctatcagaagggcttccttagctacccgcgcaccgagaccgaccagtacgacaaggcctttgactttgccaccttgatcggcaagcagacgaacgacgacaactggggcaccttcgcgcaagggtgcgtgaactcacgtcctgctgattgtcgcgtatcctaacctcttgattttccgactcgtagcctccaggacggcggcttccgcgctccgcggaacggcaagaagaacgacaaggcgcaccctccgatccacccgacggcctggaccaacacggctgtcggcgacgagaagcgcgtgtacgagttcgtcgtccggcgctttctcgccagctgctcgtccgacgccgagggcaggacgacgacggtacagattgagattgccggcgagcacttctccacctcgggtgcgttggtggattggcacgaccgtcgctttaagccctgctgatgccagtgacgccctccttcaggcctcgtcgtcctcgcgcgcaactacctcgacgtctacccgtatgaccgctgggcgacgtcgaccatccccgactttcaggtcggcgagacgtttgtcccagacgtctgcgagctcaaggagggccagacgacgcaaccaagtctgttgaccgaggccgacctcgtgtcgctcatggacaaaaacggcattggtgcgcgagcgcaggccgccctcaacgctgatgctgctgccgattgactttgccgactttgcgaccactcttgccaggcacagacgcgacgatcgccgagcacatctcgcgcatcatcgaccgcgagtactgcatgacgcagcaggaggggacgacaaagtttctcatcccgtctaacctcggcatcgccctcgtcgaagggtgggacaagattggcctcgaccgctcgctctgccggccgcacctgcggcgagaggtgcgcctccgtcaccgtcttgggcgtcgtcactcgatccgctgacgctcagcttcccctcgtttcatgctcgaaagaccgagcaccgtatgcagctcatctgcgacggccagcagactaaagccgacgtcctggccgaaagcatccagcagtacaaagacgtcttccgcaagggccgtcaggacatgcgcatcctctttggcgtcagtccctgcttcttcccttgcatgcgagtaaagcgctgacgcgctgatctgacctctcaggccgtcactaagtacctccgcaacatgaacagcgacgatgatgggggtggcggcggcggtggtccacctccggcagctggtgcgttacctttgtcactgctcatcctctccagctcttgctgacatcgctactcgctctccttaggccggcaaaacggaaacggcggcaaccagggcggagcaggagctaactcggacacgggctctaacgacgatgacttcggcggaggtggcgctgggggcggcgccgcagccggccaaggagggttcggtgtgagaggagtcaggggcggcggcgctgctgcgaatggaggtgtcggccggggtgcagcagcacggaggtcgcctcctccagcagctcgcccgccagcgcgaccgccgccgaagaagcgtgcccgggaccagtcagatgacgagggcgacgacccttgtgagtccttgatcataacgccactcgtgtgccgtcggagggtgtactgacgggtgtcgcaactgcagatgcgccaaggccgtcggcgccaagggtcaaggtctcgcctagcaagacgcaaggcgcggctgccgccgatgcaccacagtgccgctgcagcaagtcggccgttgagcggaccgtgacgcgcgactcggagaacaagggtcgggccttttggacctgcccagacggcaaggacaacggctgcggcttctttgtgcgtttccggcgctcagtgcacctgccgcctcgtgctgatctgtcctgtcttttgatccgcaggagtgggtcgacggtccgtcaggctctgccgcaccagccaagcggccctcgtctgcagtccgtcttgcccggttctagtctacctgtgacgcccggcttgtcgctgacgaggaccttccctttgcccatctgcaggcccaggtagcccgtccaccgccggcagcgcgccaggcgtacggccgaggcgacgaggaggacgaggatgacggtcgtggggctgtcctcaagtgcagctgcaacctgaccgccgtcgagcggacggtcgcaaaggagggtccgaacaaggctcgtccgtaggaagagggcaggtcatgcagcagagcattgctgacctcacctttgcctgacgaacgctagggccgcaagttctggtgcgattggcccgccatctcaatgggcaagctccttcgcaagcgacggctgacatcccctctcgacggctgcacccgcaggacatgccccaactcgcaggcggcgcagtgtggcttcttcaaggtgcgggcgcttcatccccttctagtctcgtgcgacttgatgctcacgccacgtctttcgatccgaccgcagtgggacgacgaggtcgaccaaggcggaggggctggggcgcgaggtcttggaggctatgggggcggcggaggcggtgccgtcggaggtacgtgtcgctgcctgagcgtctggccgagctgtcgtcgcacagagcctgaccaatcttatgccccttcccggcttgcagactgctacaagtgccgccagccaggccactgggcaaacgactgcccgaacgagggcgggaccggaggcggaggcggccggagcgggtacgccagcaatgcgcgtggcgggtcgtccagcggccgaggtgcccgtggcggctcctcgacgcgaggcggcagtacccgcggtcgaggctggggctcaagcttgacgcgtgggcgggcaattgcaaagcgagcgacggcggcgcctcgggccaagaaggaggtcaagcctaaggtcgagcgggcagtcaaacctctcgctgtcaagaaggaggtcaagcccaaggtcaaggccgagaccaaaccgcgcgtcaaggccgagcggtgatgcctatgcgcgactgcacttctcatcgccgctctgccgcaagtgatcgagacgtgtagacggcatcagatgggcagcatgggatattagcggccgcgcgaccgacgagacgagacgaatcgaaatacaaagcggctgcatcagaagcgtgaggggagagagaggagaggatcactaaaaaacataggacgggagagatcgggggctagaagcaggtcgcgacatcgctgatcgctgtcgatgctctagacgtcctgcgactcgtccatgactttctctgacttggtccggcgctaattcggcaggagctcggtgctgcgacggcaagggtgccgagacgggcggaaggacaatgtcagcaaggcagcgacgacaaacgatcacaagaacccgtaacagaacgcacgcaatgttgggcagaacgctgccctccgagatgatggtgctgtcgagcagcttattgagctcctcctcggtccggatcgccagctgcaggtggcgtgggatgatgcggcgcttcttgttgtcctgcgccgcgttgccggcgagctcgcagacctcggcgacgaagtgtgagcgagcgccggagacagcagagagagcgaaggacgtcagagctacgattgaaggacgggacggccgatggcccctgcgcatgcaaagaactgggcagacgcacacttgagaattgcagcgaggtagaccgatgcgccggcgccaatgcgggaagcgagtggactttctgagcagccggtcgatacggccgaccgggcactgtcgaagagcgagcgataggtcagcaaagaatgagatgggacgtgggcacgagcggccggtgggagcgacccctaagtgacgactcacctggaggccagcccgggccgagcgagaggtcgaggtccggtgcgcttcgtcgcccctgctgcccttgccgccctttccggttgacatctggctcattgcttgttttgatgccgagggcgggtgagcgagtgggcgagatgatggcgagagagagaggggtgcgttagttgaccaggcccctttccgtgtataagagacaggaccccccctgaccccccctccgccccctccaggccaagcggctgatcggccgcaagtttgacgatgccgaggtccagtccgacatgaagcactggccgttcaaggtcgtcaaggcgatgccaggcaacctccccaaaattgaggtcgcctacaagggcgagaccaagctgtttacgcccgaggagatttcggcaatggtcctgaccaagatgcgcgagacggccgaggcctacctcgggtcgaccatcaaggacgccgtcgtcaccgtcccggcctatttcaacgacagccagcgccaggcgaccaaggacgccggcatgatcgccggcctcaacgtcctccgcatcatcaacgagccgacggcggcgtacgtctctcttcgcttgcccctttctcccccggccgaggcttaaccccgctttctcaccctcccctctgcagcgccatcgcctacggcctcgacaaggcgtccaagctcggcgagaaacacgtcctcatctttgacctcggcggcgggactttcgacgtctcgctcctgacgatcgaggagggcgtttttgaggtcaaggcgaccgccggtgacacccacctcggcggcgaggactttgacaaccggctcgtcaaccacttcgtccaggagttcaagcgcaagaacaagcgcgacatcacagtgggttttgctcgtgcctggcgctcgtgtgcagaaggcgaccgttgctgaccctcttcgcacttctgccgcaggacaacccccgcgcgctccgccgcctgcggacgtcggccgagcgggccaagcggacgctctcgtcggcggcccaaacgacgatcgagattgactcgctctacgacggcatcgacttctacacctcgatcacccgcgcccggttcgaggagctttgccaggtgcgccccgtgccggccccctttttttgtcttgatcctcgagcgctgactgaaaccccccccctacaccctgctcactctatcgcaggacctcttccggacgacgctcgagccggtcgagcgcgtgctcaaggacgccaagatggacaagtcgtccgtctcggagatcgtcctcgtcggcggctcgacccggatcccaaagatccagaagctcgtctccgactttttctcgggcaaggagccgtccaagtcgatcaacccggacgaggccgtcgcatttggcgcggctgtccaggcggcgatcctcaccggcgacacgtccgagaagacgcaggacttgctgctgctcgacgtcgcgccgctctcgctcgggatcgagacggccggcggcgtattcacgcccctcatcaaacgcaacacgaccgtcccgactaagaagtcagagatcttctcgacgtacgccgacaaccagcccggcgtactcatccaggtctttgagggcgagcgcgcgcggaccaaggacaacaacctcctcggcaagtaagtcgaagcgcggcttgctgctttccccacctctcgctgaccctcctcttgcctgcgcaggtttgagctctcgggcatcccgccggccccgcgcggcgtcccgcaggtcgaggtcacctttgacgtcgacgccaacggcatcctcaatgtgacggccgctgacaagacgaccggcaagacgtctaagatcacgatcaccaacgacaagggccgcctttcgaaggaggacattgagcagatggtcgctgacgccgagaagtacgcggccgaagacgcagccgtcgccgagcgcgtcgccgcccgcaacgggctcgagtcgtacgcctactcgctccgcaacacgctccaggacgacaagcttgccgacaagtggcagggcgacgacaaggcgacgctccaggcggctgtcgacgaggctgtccggttcgtcgaggagtcgcaggaggcgagcaaggaggaatacgacgaccaccggcacacgctcgaatcggtcgctaatcctgtcatgactcgcgtccatggcggcgatggtgcgggtgcggcacccggcccctcggtcgccagcaccgagcccagcgtcgaagaggtgcggtcgtagcatcgccctttgcaggacgtgctctgactgactttctgcctacccgctacaacaggtcgactagacgacgcgtttccaggacgtgctcgtctctcatctcctctcgcgtggcccagcgccggcaccttcctgtttgacgccctcattctccctctccacgactccacttcatctccttcacgactcgatctcatgcccctttttcccttcacacccgtcagccgtcgtgccgtcagccggtgcggtgcggtgcgagacctgggccgctcgaggtcagagcgcaggggcgagcggtgatggtacatgtgaaatctgcaggaacggtcggctccaggccctcagaatatcctgccaaacgaattggacagaagaaaggagggagggggggtcagcgcatggtggttgacaagcgagcgcatcgtcaagagggcagacgcacgagtcggcgctgtctttctggctgtcgatcagcttgacgaccgagtcgacgacgtccatatctacccacgctcacgacgaaaaggtcagccgccagtcgggtctatcttccgccgtaagggaacactcaccgagcgtttggccgaggtccatcgtcgtcaggacgcggagcgagaggtcgtcctgcaccttgccgatgacctcgacataagggtccgagaggtgtgcgtcctaagtaggtcagcagcggagtgaagggagcgtgcaggtcagcgacaggtgctgcaagagtgaggaagacggacgacggacccggttgaggtgaagctcgacctgagagcacgcgcaagggtcagcgggcggcgggcggacaataactggcgacggtgggacccgactggagcgacgtacctgacccttgtcggacgcctcgacgatggcggtgtcgccgttgagctgcaggggcggcgaggcagggtcagcatgcaggccgacacgcgtccgagtgccgtcagatgctgctgaccttgacgaccttggctaccaggcggacagtctgggatattgcaggcgtcagaatcctgccagtcactacgatcggctcgtgaacgcaccttgcccttgtagttgccgatgctacgcgcagacgatagggagggtcagcgtaatgagcggggagaggacgacgcgtcggcgacacgcacagggcgccgttgacgcgggctgtaacggggaaggacctcgctctgatcagcctcgcaatcctggactagcgacgagcatagaagcagtaggggaactcacgtgtgctcgagaaggcagacatgctgggaagtagggaggttagaggaacgagggtgctggtcgaagggcaggtcgcagcgcctccggcgaccgtcggctcctccgaaacggccatcccagtcggccaacaactcgacgactcgtaccatctcggccggccctcctaggtcgatgtctatcccgcatccgtcggcgcccaagccgtcgggaatcgacggcaacgtcgtgcccgccacgaaacggccggatggctcgtcaggccccttcctactatgcgccctcctcctgcctgttgctgcgggctgacagcaggcctgacctttctcttgccaccctgctgacttgctccatcgacacctctcgcagcgtgcggaaggagatcagggttcggccgggctacacaccgcaggaggacgtcgctcgctaccggagcccaagggtcgcccgcaagcttgggcacgagtcgccgccggcgacaggcggcgactcgggcctcaagggcctggccgacctactcaagacgctcaacgtcgacgacaagtcaaaggcggcaacccaggcggccgcagtgccggcaagtccgctcgctactcctcctgcctctgctcccttgacgccgcgcgctcccttggcgaagccaaactggcggaccggcaagggctcgtcggcgagcatccatgcgcccgccgccgtcagggaggccgccacagctgctcctgcccctgaagccgatcaggtccctgcgacgaaacccgctccggccgcaagcggcaagggctccgcagcgagcatgcacgctcccgccgctgctgtcaaggaggctgcgccggtgtctaccccgccggccgccgtcactccggctcctgcgcctgaggctgtcagtatctccctcaggcctgctcctgcactcctagcggcgcaagcgccgcctgctccagctctcgcgccaaagaaggcgcccgcttcgccttccaaaccgacgccagcggccgcacccccgcctgcgccgccctctgtcccgcgcttgccagaggccgtcgccgccgtcgccccgacgccagagcgcaagacgtcctggggcgtccacctccggacaacctcctgggccgatgaggtcgacgagctctcggacccagagtttgacgacccgccgccgctgccgccaactcttcctgccccggcgcctgcgctggctgccgggggagcttcgcgcaagccaggcgggaaaggtcgaggcaagcgtaagcctgcgtcggccaagccgagtggccagtcgacgccggcgccgtcgaccccaaccaacggcggcgtcagcaccaattcggtcaaggggcgcggagccgcgagcggcggcaagatgcgcggctgggacgactgaagccgcttctgcgcatcagcttgccggacgcccatctggcgtcgcccgacgactctgcgtcatcgtcggctcctccatctcttactcggatcgctcgtctcttgctctcggtcccttcattcttctctcgttgcctgttcccccatcgcctctcgtcaatgtaccctcagccggagccgctctcctgaccttatgaccgcttatcaccggaaactcggcgcagaagggatttgtgggcatgagggtgtggcatttcatttgtctggcggcgaggccgactatgcgtacgagtcgacaagcgactcgcgcatctcgttgatgatggccgtcgagctctggccttggagctctgcgaggaggaggcggcggttgcaaacggtcagtgaaatgtcggcacgatgggcgcgcagacgagtgaggttgggacctactaaaggtagcctcgatgactgaaatctcggtcgcggtcgtgtcgatgccggtgaaggcgcaccagtcgttgacaacgagtccggcgccgagcacgtccgaaccgcggttgacggttccggcgacgagcgggacctggagcaggctgctcagctcctcctgctcgctccggctcgtcttggggtggacgaggccgccctggttcgacagggcgcagtacgagccaacgaggacgttggacgcgaccgtctgccggaagacctcgaccttgaggacgtcggcgatgatctcctcggtctcgcggtcaatgtccgggtggacgagcgcgacatagtcgttgcaggcaatgacgttgccgagggccgagagacgctcctcaacccgctggatcgcgaccgacggcggcagcgagttgcgaatgtgttgcagctcctggtcggtgcacgacgcagggaggaggagaccatgccggttgcctgggcgagcagtgaggaaggccgttagtgacgaccagagagcggccggagccaggagcagtaaggcccgaatcgactgggacgtaccagcagcgagccggccaatgatgcgcgtgccaccgattgtcgtgttgacgatcgggatgacgtcctggagctcagcctcgaagtgctgatgttgcggcagggtggcgaggcgacgagatgcgttcgcagcagagggagacaagtggcgacgacgacgggaggggcgcacgctcggtcagcaacgatgcgcgatgcgcgagcggcaaaaaggacaggcacagaccgagtagaagttgacggagcctccgacggcgacgaggcagtacgagttggtaagaagggagaagacctggcgggcggaaggcaggccgggtcagcctcggcgagcctggcttcagaggagctcggagagagggacggacgccgatgtcggacgagttctcaaactggagacgggaggccatgactacgggagggagctctcggtcgtgcgagtctggcaagaaatgtggtaatgggggagggagaggttgtcgagggcggtaagggtgtaggggtgtccgaggtgtcgtcgaggagctgctgcgtgcttgccggctactggccgcgcgcgcagggggcaggttttgaatcgcccgcgcgcgcccgcccagccgtcggggccggccagggttctgacccccgagcgagtcaagccgccctgtcgaccgacaaccacgaccctcctcggatccgcctcctctcttctagtcacacatatctgcccaatggacttctcccagttcaacgccgccgagcaggcgcacatgtgagtcaaccttgctgcttcggctccggcaggaacggcggccgcactcggcccgcgccgtcttgcagctcaagatcgaccggccggctgtcgacgatgacctgcccgaagctgaccctcccggatgctggctgactcgctcgtgcctctgaccgtttctgcgatcgcgtctactaggaccaagatcatcgagaagaagcaggtccgtcccgagccagcgctcgctcgccgcgagctcccctcatcgcctgcgcctcctccgatgacgcctcacgcggccacaactccgacctggctggcctcgagactgactcctgcttcgtgccatgcctcgctctcgacactccagatgcaggacttcatgaagctctactcgggcctcgtcgagcggtgcttcaactcgtgcgtcaccgacttcacgtccaaggttcttactggcaaggaggtacgtagcagcttcgtctgatctcagagccaggcccaggggaaaggcctaggcggcaaggctgacgccctttccttctcgccattcactcgcatgtcgcgccgctcgtctcaggccacctgtgtcgccaactgctccgacaagttcctcaagcactcagagcgcgtcggtgcccgtttcgccgagcacaacgctggtgcgccctatctgcctcgctttgctggggcagccatgagctatcgccctttgccttgcgcacgcgctgaccgttcacttgacccgacttgctggcctgcagcccagatgcagccccctcagtagatcgaattacacgcgcaacactgaaacccgtccttgtatcactatgtcctgctgcctactgccctgccttgtgttccgtctctgcctgcaagatgccttgagtctgagcttgctcgcgttttctctcgaggcggcgcgtctcgacgtttcgactcgcgcgcgcgcgccgccttcgctcggctggctcttctgctcgccctcgctcctgcacctctctatcgttccatagcataagaccctcgttcggacgtcccatgctgaggccaggctacagctcgcacccaaccgacgacccgaacacgctctcccgccgaaacaccacgccctcgccgacgacgtcgaccgccagcctcccgacccctccccgcggcgccgccccatcgagccggcccaaaagcaacccgccctccttctttgacagcgtctttggcggcatgatgcgcgacaacaagccgtacggccttgcgtcgggcgccgactcggacaagaagaagccagccttctggaaccgcgagggcacgtttttcggtgcgtccgggtcctcctcgtcgttaagctcgccgtcgccgctctcctccgcgcgtcgcaaagcagaacaagggcgagcgcgtcgtcgtccgtcctcctttgggttgcacgacgtcgagctcgagctcgacctcgcggtgctcgcctgcgtctgttgcaggcggcctcgaccttcgagatctttaggctaaccttccgctcccctcctcctacgcgtctgctcgctcgcgactccaggcttcccaccgcgcctgatcgccttcttctcgctcctcctcctcatccttttctttaccggcgcattaccgctcggctcgcacggctcctcgagcgccagcagccggcacggcctgacgcagtcgcacctcctgacgtcgcacgactacctcaatgcctcgctctcggacccggcgccgtttccgttctgcccaatctacgggcccggcgatgaggttgccaaccggcgcggccaggccggcctcctccggagcaagctccacaccggcacgggcgctcgcatgcagcgcgtcgttcgcaaggcgctgagcggcgcaccgctcaccatctcggttctcggcgcttcgagtgcgtcctcatgcgcgcggcgcgacaggtcgcgtgaacagagctgatggcggatctctccctacttcagtctcggcctgccacggcgcgggtgacgacccgatctccgcaaagtgctacccgtccaagttcttctcgtggtggaacgaggtcttcccccacccggcgtccgagctcacgaacggcgcgacgcgcaacgccgactcgtcctactttgccttctgctccgagcatcatctcccggacaagacggacctcgtcatcctcgagtttgacgcggctgaccccaagtgcgtcggcgtgcttcgttgattggcgaccatgctagctcagagctgacctctccttcctgcccccttcccctcgctcacagcgagcccgagtggatgaaccactttgagctcctcgtccggtcgatcctcgtccggccagaccagccagccatcatcactctcggccactttgcgccccaggtccaggcccagcatggctatgtcggcccggacctcctgcacacgatcgttgcccaatactacgacgtgccgcacattaggttcgttccctgcccgacctccctgtgactacaagctctgcgcgctgacgagcctccctttcgactccagcgtcaagggtctgctctaccaggactacatgaacgggcctgaggaggtccgcaagcagttctacactgatccgatgctcgcaaacggcaacggccacgaccgtgcgtcctctttgccctgccgccagtaaggcgtcgctctttgctaatcagaacgccctttcgcagtcatcgccgatgtccttatctcgtacgtccagtcgcaggtctgcgttggctgggcggccgcgatgggccacggtttcgacgtcccagttgccgacgactcggccgacacgcagggctcgggtggtgcgcacctgctcggtggcgtcggcctccggaagggcagccctggccaggacaagggtgacggtggctcgaccgatccgcactcagcctactacgctgcgctccgcgtgccgacgtcgcgcctgacggaccggccgggcgacgtcggcggcttcagggaggtcgagccgttctgtgtttcggccaacgacctcattaacccactcccgccgtcgctcttctatggatcgggctggcacgcctaccacccggccaacgtccacgacgcaaacgaccggcactactggtactccgagcagccgacgagccgcctccgggtgccggtccggatcggtgccggcgaggtcggcatctactacatgcagtcggacgaggacagcccgctcgggaccgccctctgctgggtcgatgacaacgttggcggcggcaaggagctctacggaactgccagcggcgtcggacccgaggcgccgacgctgacgatgatcgacaagggtgtcgccaagggcagccatttcgtcgagtgccagctgcacggcgaggagggcaagctgagcccgcccttcaagatcctgtgcgtcctggcttgggctgcttctttacgatacgttgctgacttctcatcctcgcgctctcagtggtatctttacgacatagagggtctgcagcccctctcttgatggacctctctctctgccctttagacttctcagatccctccttactttcgcctgggcgccggcccgcactccaggcccagaactctccccctctctctccgctgtcgtgtcgcatgtctgtgtacgaccatcaaggagggtcttcgagcccctccccatccctccgcgggcaacgccggtcctcacttcccagccacttcctctatctcgcagcaagaaaatcgaaagatcaatgaacaagccaggcgagacggaacaggaaagggggcattacagatcgtcgtcgagggcaggaggcgtgagctagatcgggtttcaggtgtttgtcactcagagcttggccttgccggcgcccttgcgccgactctccatccggccgacctgagcctcgtgcacctcgtccggaccgtcggcgaaccggagcgttcggagactaacccacatgtaggccagcggctggtcctggctgagaccttcggcgccaaaggcctgaatagcgcggtcgacgacggccagagccaccttgggcaccgtcagctgcacgagaggggtgggaagtcagcttgagacctggacagactcgcacaacacaggagacatacctttgcgatgccgatggccttcatcgcgccctttgcaccgacgacgtcgacctgcgcagagcgaccgactgtcagccgtgcgcctttcttcaccccttggctctaatctcacctgatgagcggccgccagcaccagcagccgtgcctgatcgatctcggcccgactgagcgcgatgttctgcaggacggtgcctggagagcgcaaggagcgtcagctggagaagaccttttaagatcaagaagacgcaccgtgctcgacgagcatcttgccaaacgtcttgcggctcgggtcattgacacggtcgaccatgaggccgagtgcccgctcagccataccaatgcttcctggatgagtggccaaacgcggagtcagtcacgagcggtcgactgacaaagctcgatgagggagaggggacacgtacgcatgcagtgatgcagtcggcctggtccgagacgtccctggacgatctgcgcatgatgagagttgccacccggcatgttaaccgctcggcctcgacaaccttgcgaatgaagaaggaagcgcacctcgaagccacggccccagccgccaatcaggttggcgagcggaacgcggacattgtcgtacacgacctcgcagtggcctgcgaacaaagtggaagagcaagtcagcaaaagcgtcggtcgtacagcgctggcggatggcgcaaccgaccttcgggagcgtcgtcgtagcccataaccgtcatcggccggacaacgcgcaagcccttggtgccagtcgggatgagaacaatcgactggcgtttgtacgggtctgagttggcaccgtccgagacgcccatgagcagatggaaggcgcatcgcgggtcgcccgcgcccgagatccactacgaaggctgatagtcagcactcgcttgatcggaagcgtcagacaaagcgtcacgcacccacttgtggcccgaaatgacgatctcgtcaccttcctgccggatggccgtctggatgttgcgtgcgtccgagcttgcgactggtggcatgagaagacagggtcagctgaaatgcgaccagtgggttgctagggacgaccaaacgaaccgcccttctccgtcatggcaaaggccgagcggatcttgccctgtagcatcgggccaaggtaatgctccttctgtgcctcacttgcgtacttggcgaggagctctgtcaatcccggaaggtcagcgagtgacgacaacagcaatgggccgcgcgtcaaggagggaggtatctgaagagtcgccagacgcacccatgttgcctgagagagacgaccgaagcgaatgcgaatgaacataacagacaaggatcagccgtccaaccctcccagcaaagtccaatgtgatcaaacggcgcaccagtgtctggcgcggagcaattggtcgcctgaggcgcgatcagaatgctgcggcccatgctgtagttgaccgagcaagcgacagagggcagcagattatcagacgtcagcaacgggacagatcggcgccagctggttggcaggggagcgactgacatctcggccatcacggcgtactgccaggaggcaaggtggggttaggtgcgcagtcgaccgtcagctctcctcttcgacatcgtcaccagagcgccctcgtccgatccgctgttcaagcatgagagtgactgcgggaaactcacctcgacgtttgtcaggttgacgccctccttataaccagccttgcggctgaggaataggttccacagaccgcgtgccttggcccgctccttgagagcctccatcgtctgcggcgagcgtgaccagcggccttcagctaccgtcggggcgatctcggcgtggtaggcgtcttcggacggcaggcaatcggtctggcgtgcgaaggggcgtgtcagtcggagactcgtcgtgcgcaagaggaggaaggagggtcatcgtacgaagacaaagtcgacgagctcggcgatcagacccttggcgtaggtcgacaagtgcggctcgatctgtttcgcaggacgggcggacggaggagcgcgacgacagcagagaagaaggatcgaccgtcagcaatgtccgatgatagggaagagggcgagcggcctcggacggacgagggcgagcgccgacggcgagatgagctcgccgagagccgggacgacggcgttcggcgctgctgcggcgaaagtcgagagcatcgttcgaggactgaggagctggcgggtctgtcaagatgtcaaggagaaagagcgagcgatggcaaaggcggaaggaggttggtgtggaggtgaagggacaggcgagccagccggtcgacggcaaccggcgaggacaagacgccgaccgattcggtcggcttccgccggacctactgagtaccttgtggcgctctcactgatcgcgctcgttcggtcgacacctccttacgatgcacaatctccagtcgtcatctcagtcgcggatggttggtttttatttctcatgaagatccctgtcgtcggaggtggtgaagcggaggaaggggtttttaagggggggaagggaggggtagaagaggccgagacgccgccccgttctagtgcagggaggaagggcgttcggcggtgaggacggtagacaagtaaggtcgaggcggccgcaaggaaaggaagaaaggcggctacgacgacgacgtcgggggaaagagacgacgcttagtcggccttggtgacgtccttgaactggagggccatctcctcgccgagggcggcgacgacagtgacgacgagctccttgccgttctcaaaggcctcctcgaggtccttgccgagcttgtcctcggggaccttgacgtcgtccttcgagttgccgtcgtcgtccatgaggttgaggaatccgtcgtcgatgttgacgagctggaactcggtgcgggtgacgatgggcgactccatgttgtgggtcgagggcgagatgtcctcgagcttcttctgggtgaagatctggagcaggcggaagaagaggcgtcagccgcaggactcgcctcagtcaaatgcgggctgagagactcacgtcggtggcgatcaggtggaccttggcgtgtccgtgcttgccggtcttcgaggtcgacatgtcaatgatcttgcagggacggcccttgatgacaacgtgtccacccttgcggagggcagagcactaggcgaaaggaaaggcacggcgcagagtggtcagcggcaggagtcaggaaacggaatgaagtgcctgccgagctggcacgccagagcaagactcgttggccagctcttcctcaccgctcgctccttcggctctaatgagaagagcgcgagagggcagcggcaggagcccgtaaagcaagtgcggcaaggcccgacaggacaggcaagcctcgtgggtaggctggcgacgagaacaaggaggctcacctggatggggtagcggtcggaggctgcagagaagaggaaggtcctggtcagagagctcgagcagaaggggcaaagagccgaggcagccgggcctgccttggccgggacgctggtcgtccgagcaaaggtcgaggctcgaccggacgaagggagggttacgcaccaccggcggaaccaccgacgaagtcaacctcgtgctcggcgtcagacattgtgagattaagaaaggaagaagaggggtggtcgggagctggcggaagggaacgggcggtggcagggtttttcgaagggcggccggcggcgagggcgagcgagcggcaggcgacgatgggacggccagacggacagggcaagaggagaggagcgaagtaaacgtcagctggctgggcgataggacaagggcctgccaaggcggcctgacgactgagatgaggagcaggcgaacgtacaaggaaggagggacgatgtgacgggcaaggggaggacgaggagcttctctctctgccagccgccatcgtcgccccgcccgcgcgcgccagaccgagaaaaccgagcgccaaagtgcaggtgcgagtggagcgtaagacggagcgtaacagcccgagtaacaagagggggaagctcgtcgcccgaccagcgactggtcgacggcaccgtccatcgccgcaacgccctccatcgctgccttccagcatacaatccagacaaccagacggctctagcgacgacacaagcaaggcgaccgccgccttcccatcctctccagctccccgcttgctcgctcgctcgctcgccgccgctcgtgatcggccgccctccgcccttccctccccgcagtcggatggactcgagccagagctcaccgacgtcgtcctcggcctcgtcctcgcgcccgacatcgccttacgagctcccaccgccgtcgctctcggccgcgccgacaattgtctttcgcgacaacgccctcgcgggaccctcgacccggccgcactcggtcttctcccaggcgacgccgacggccgccgcctatgccgctcactcgaacgcagccgtcggcggcccactcgccctctcacgcaagtcgagcgcgaggtccaaggccggccgcttctggctcggcggtagggccaccgccgtcgaccggcatgggccaggcgggccaggcacccggagcgggagcgcgaccgaggaggagatgagcgagcgcgactaccacgacgatgtgtgagttcctcctcgcccgtgctgccctgaccgctgccctgccacctctcggctgctgcgagtgagctctcttagagctcgcccgtcgcagcagagaccctccgagtgaccctcctgggtgtttggctgcggcggtagctccgaccgagcgtccctttgactgacaacctcttgctcgccccgcagcaaagagacgccggtgctcttcaagtccaaggacgaggcgacgggcaagtcgctcgtcaaccagtacttgatcctcgacgaactcggccgcggccagcacggcaaggtccggctcgcgcgcgacgtcaacgacggctcgtactgggtccgtcgtcccccttgtctcatgtttgccaaagctgacgaccctcttctaccaaaactcgcctgcgaaaccctctcatacctgctctacgtccaataggctatcaagatcatcaaccgcaaggcaaaaaagaagctctcggccttctcgtcgtcggcccgcgcccagccagagtcggcccagacgcagaaggagaacaagtgagcccctcatcctcttgattgtcgcttggcctgttcgcgcgcagcgcccgtccctcttcacttctctaacctctaccttgttcctaggctgaggaaggagattgcgatcctcaagaagctgcggcacgagcacgtcgtccggctgcgcgaggtgattgacgcgccctcgtcaaagtacatctttctcggtgcgtcgccgtcgaggcacaggcactcgagctcttgctctcgtgactgaccctccttcgtaaaccgcagtcttcgagtacatggagggcggcgaggtcaagtggcgaacgtcggacgagcggccgatcctaacggtcgatcagacgagacgcacattccgcgacattgtccttgggcttgagtaccgtgcgtcctgtcgaaagctcgcggcgttcactcggcgacggccggctgacacccacccgcattgcttcctcacagttcaccatcagggcatcatccatcgcgacatcaagccggccaacctcttgtggagcgccgatcactcggtcgttaaaattaccgactttggcgtctcgcaccactcgaacgctctggctcgagcagcggctgaggcggatgccgctgctgctgcagcagcgacgacagcagcgtcgacggactctgcgaacggcagcgagccgacagctgctgcaccaggctcggaagagggtcacggcagcctggatcgtgccggcgtgaggtcgaaggggccggtcgacgagggcatcctctcgcccgtctcggtcgcgagcagcaccggcggcttcaccacgggcacgctctcgagtacgctttacgaccgagaggacgaaaccgagctcgccaagacggccggcagtccggctttctttgcgcccgagctctgctacggcggcgagacgacgccgatcgccacgacgccgctcggaagcccagcggtcggcgatgacaccagctttgaccgagcggcgacggctgcggccggcccatccttctttgcccgccgcttcacgtctggcagcggtggagggagcggcggtcggccgtcgctctcgcatcgcaactcgtcctctcgcccgcagagctcgtcgtcggcaacggcacagccgttcgctgctgctgccgtcgccgcgggcggctctggacctggctcgtccggccaccagacgccctcgccccatccgtcgatcgccgtccggcggccgcggatcaccaaggcgatcgacatctgggcgctcggcgtcacgctctactgcctgctctttgcccgcgtgccgttcgaggctcactccgagtttgccctctttggcgtcatcccgttcgacgactatcgtgtgccggagagtgcgggcgccgacgagcttcggaccggcaatcgggcttgggacgccaacgaggaggcgcgcgagcttggtgacctgatggaccgcctgctcgagaaggaccctgagaagcgcatccggcttgaggaggtcaaggtgagcaatttctggctactcactcgcttagctcctcttcctgacgccgcctttgccctcgctcagcgccatccctgggtcctgcgcgggatcgataacgtccacgactggttgacgcggaccgaccccaacaatgatacctttgttaccgtcacccgggacgaggtcgctcgcgcgctgaccgaaacgttttcggccaagatccggcggacggcgtctcgcatccggcacaagcttttccactcgtcggcgtcgtcgtcgtcgtcggctatcggcacgagtgggcacgctggcgtcggcagccatagccaggcggcaatgagaggccagatcaacccgcggacgccatcggccggcagctggagtcgacggagcagcggcggcgctcacaacgcgacctacccctcgacgacgagcagccggcccattccgtcgtccgccccggtcacgccctcggtctcgccgctcggctcgctccggcggcccgaaatcgccggcagcggaggctcgtcggccggcgggagcgtttcgtccctccacggtggcatgtttgtcgccccgacaccgccgccatcgctgctgccgctcgcacccgtccagccgatccagcggacgcgttcgcccctccgttcgccggcgctcatcccccgacggaccgtcgtcgccgccactgccgaggacgcctacgccgacgctgccgaggaggacgacgacgtcgacgtgtccattgcatcgatcgacgacggcgggagcgcctatggcgacgtcgagcaggagacggaggacgacgaggacgagggactggcgctcgagtttggcaagaacaagcgtcgccaacaacagcaacagcagcagcagcaggaggagcatccgacgccgacacagccggtccggcacgactttctgacggtccctccgttgtagccgatcattttgccacggcctgtcgctcgctcgcggtcgccattcttgaatcctcatatgaatctcatgcgctcatctttgcttgctcatcgggccgtcgtggcgtgtgctgtaactgcaggtagcgtggtcctgtgagggtcgtttcccggccaaactttcgcgccggccactcttcgagaggcgctgcatgggtgtcgctgcgtgaagagagaacgagtgatctctctgtgaagcgacagatggggtctgtcctctgtgagagaaagctttctcctctcgtcgaacgccctggccttggtcccttggcatggcctgctcctcatgggaggctggctgttgaaggattcggcccgcgccgagacagccggcggcggagcgagcaagggcaaccaggtcgggcgcagcgacgattcgtcctgctcctctcccctcgactcgttcctcctttccgcatccgctcctcgctctgccctcgaagctggccttccgaggtcgcccctcgtccttctccactttctcgccacaggccgcgcccagcacggccgcctcaccacccagggctcgccagcgccaccccagccccttcagccctcctcctaggaccccctctcttcggtctcctcctcctcgcttcctcttgctgcagccccacaggagctcagtttttccggccggaccctcctcctagcgagtcatgccaccacctctcaagcttgacgccttcgcccaccggcgctacgccctcgtcatcgacgccggctcgtccggctctcgcctccagatctactcgtggcgggacccaaagtcggaaaaggccgagcttcttgcgattctcgacgctgccggcggccgcaagggcaagggccgggccaagacggcagcagagggcggtgcgctccgccggctgccgagggtcgagaagggcgtcgccggtggcagcggcgagtggcagaagaaggtcgagcccggtgcgttcttcctcgctccgcctcttcctccagcgcctgccagcaaggcactgacgttcgcatccatgctgccgccgaaggcatctcgtcgctcgccaacgcgcccatctcggtcggtacgacctcgacctacctcgccccgctgctcgagcatgcccgggctgcgatccctccgtcgcatcatgcggcgacgccagtctacattctcgcgacggccggcatgcgtcttctgtccgaagccgactcggccgcgctcattagcgcgacgtgtgacgtcctccgccagcagacgccgtttgccgtcgagccggccggcccgctcggcccgtgcggcgacagcgtccgcatcatctcgggcgaggaggaggggctctggggctgggtcgccgtcaactacctgatggacggctttggcgacccgaccgcgctcattccctcaactccggccgcgtgggaggatgctgccgagcgcgaggccgccctcgacgacgtcacaccgttcggcttcctcgacatgggcggtgcctcaacccaaattgccttcgctccgtcggcggccgaagccagcgcccaccaggactcgctctcgagcgttaaactccgactgctctcgggcgaggacctcaattacgacgtctttgtcgcctcgtggctcggctacggcaccaacaaggcccgcgagcgctacgtcggcctcctcgtcgagcgttgggaggcctcgggtcggccggccctcggcgacggcccccgcgacgagccagcgatcccggacccatgtctgccgacgtcgctcgcgctcgtcgagacgcccaagctgccgctctcggcgctaacgacggcctcgtcgtccgcggcgcttcagcacgcctcaagcccgcacacgctcaccggcaccggctcgttcgacgcctgcctgcgctcgctccagccgctgctcaacaaggacctgccctgcccggccgggtctgattcgacgacgtgcctctttggtgggctctctacgccgcatatcgactttacccgccagcgcttcatcggcgtcagcgagtactggtattcgtctgagcacgtctttggtctcggcggcgcctgggacttcgatgagtttgaaagcaaggccggcgccttttgcggcgcagactggtcgacgattgaaaaccgcttcgagcgctcggccggcggcccgcacacgggcgacggcgaggtccttgacggcaacggccaggttgtcgcgaccggcaaatggggggccgaggtgcgttctcactcttgcctgaacacgctgctcgtggcactgacctctatcgtctcttgcaggttgagctgtcgcgactgaagatgcagtgcttcaaggctgcctggctcgtcaacgtcctccacgagggcattggcctccctcggaccatcgacccacagtcctcgccagcatctcatctaccgtcccaccctggcggccagtcgtcgccctcgactccatccgacacggagctcgaggccgtcaagaaggccagcgagaagggccttttgtcaccgacggcctccgccgatggtcccaatggcacacgcaagaaggccaagggtggcaagcctcactttcagtcggtcgacactgtcggcgacacggccatcagttggacgctcggcaagatggtcatcgaggcctcgcgcggggtcgagccccggctcgcctcatcggctcgcgagccgtggtttgccctgcccaagcacctcgacgggctcgtcgacggtacccggctcgcccagctccggccagacggtcaagccgtatacgtaatatttggcctcctcgcgatgctcctcatcctcggcagggtcttccgccgccgtactggctctgtcttacgcggcagcccgatccggcgggccaagaaggcgactgatctcgacgccgaggaggagctgttcctcgggagcggcacgattactcctaccctccggccagcaaagcgttctggctcgctctggtcgctcgtctcgacactccgccggatcctaccgttccgaccgggcggcctgccgtcgagcgcgcaccagctccgcggtcgggcgacgctcaagcatatcagctcctcgccggccattatgagcgagtttgccggttcgacctcggcgtctggatcggtgctctaccgaccgacggcgtcggcttttgccagccaaggcaactccccgccgccctcgccccggaggccggtccggcctggctcggtcgaggtgcagctcactcgccgtctcagcgacgacgagtacggtacggtcgactcgccgctcgcgaacggaccctatgtcgctggcagcgctctgcccggaggaccgccaccgcgcatgcagcgccggccatcgcctcagacaggacccggcgggcagtcagtcgacttccatctcctccccctgcgcgagatcctcggtcggactctgccggcttcgacgaacggcggaggctcggtcgccggctggaatgatgtgccggccgacctactctcgtctagctcgacgagccacgccggcggtggtccctcggcggggcagcaccggtccggcgtcctcacgccgccggcgacgtcgctcaactctctcaaaagctcgcgcaactcgagcagggtcgacttgactggcctgactggccgcagcttctcgcgcaacacgctcgcgatgtcgtccgacgactcatgattggcccctgggccgattcagccctcgtcgaccacgctcgaagccccgcttgtaccgtacctcgccgctgctgccgtcggccggccaccttgtactctcttggacattctctctcttctttcttctttacccgcatgccgtctaatgccgaacgctcctcggacgctcctcatccccccccccctccccttaccctgctacggaaccctcctcctcctcccttgttgcattcgcactctcgcaatcgatgtgcccgtcaaccttcacacgactcgaaagtggtcgtcatcgtaatggcagaggcagcgggctgagccggccacgggcacgggatcaggccgtgagcagagccagagggcgagccgcagcagcagcttcccaagaatggcagaggaaaaggggtcgggttgaagggcgaaaggggctgggaggtggggctagtcgccgccgtcctcctctccgatgatgctcccggctcgccgcctgcccttggcagccgacccggcagaaaatgcaagcgggaagatgcccgccaagggtggtcgggtggctttgatggctgatcgcccgcagccgcctgcgccgcccgagacggatcccgggtcctgccacgactgagctcggacgaaggtccgtcctggcagcccactcgcggccgcagagccgagcgtgaaagcctgcggcgccgaggatgtcacccgagcgagtcggttcaccctcggtggtggctggagactgcccatccgagcgagtggcggcggcccgagcgacggcttgagcccacccgcgccgcccagcattgagagaccactgccgccgccgaagcgtgatgacggccgagccgggctgccctcgaacgagtcctcgaaagacgagtcggcgaatgatgagtcggcgaaggtgttttcgtcctcgtggtcgtccatcgagtggtccgcctggagtgtggagctcgcaccaagcgtggtccgggccgatgctgctgctgcgccgatggtcgccggtgccgcgcgctcgtacgtgatccgctgagaggggatgccttgactgacggacgaatgtggtcgtagctgcggccgagtcggctggaggactggcgcggtgcgagagccctgccacgactgggcccggtgaaacttgcgcatcgtgtggatctcggacgcccgcttcgcgacgtgagccggatcgtccattgaaacgtatgcccggggttggcacaatccctgagagcgtgcgagccaggtggttatatttgttagtacgcgcgaatgagctcgcagagcccgcgcgtccgacgcaccggctgttggcgatagaagtcgcagtagccgccgtcgagaatgtacagctccgggtagtatagagccggatacaccttctggttggccgcccggtccttcttgcgaaggagcttggctctgatgaggtgtaaagggaaggaaggcggtcagcgacggtttcggcagcgatcgtggtcaggaagccgccggaacgaacagctctggccctcgcttctgcgagaattcgcagtgaaagatgacgaccgtcttcttggcctggcctgaggcgtcgggcagaccgctgatgctcggtagagggatcatcccgccggtcgcagacacccggccgctcgcgctgctcgcgggcaagaagtgcgaatcgatcccggtctcgctctggaggttcagggcgccatagacgtgcccgccgttgaactcgtagtcaaagcggcagtcgacgatgtagagttccgagattttggacatgtaagctccgttgacgacgtcgcgcaactgcgaggaagaggagaggggagggttggttgagctactgcaggcgaggttgagctgcccgcggccggagggtgatgcgcaaaggcagcaggcgaggagctcgaggacggaccgttccggcgtcgatgcgcatgaggccgtcctccttgacgctcttgcaaggtaggatcttgccagacttctcctggttgctaaagccgacgaggacagacggcagcgtgctcgtcgacgcttcggcgcaaggtgaggtttcccagtccatcgtgcaggccagcgtttgactagcgagggtcggcgagcagcagcgaagtcaagggtcgatacggcgaaggtcgaacaggtgccggtctaggattggtgtgagagagcgaagaggaggtgagggtgaatggagagaagggtgtgcgtttcgggccgttcggggtcgcctgcctgccctctgtttctgacgtcggcgtgcaggcggcggcggcgtctcgcgggcgcgtcgctcagaggcgatcgagcccacggccgagcttccctccggatcctcgcctccccttgacggctcgagccagacctgcggggttagcagccagtctcggagagtgacgactatttgatgcctcgcgagtatccatcacatcgagcgagatgaagggggtcgcaagggcttgcttcaaggggcagacgcgcgggaacgaggccagctggctcgcgcagcccgcaaagtcagtcgcgtcaaccgtgggcgctcgctgcctgcatcaggcctgggctccttctcggcctcagaagcgccgcaaggatgagagaaacgcctcacgtttgcagcggacaacaacgaaccaacagaccagcagaggccggctgactacgggacgccttgcttcttcagcagggatgcaattgagccgtcgcgcgctgcagtcgactttgtggtaggccagcagcgaaccaaaggagacgacaatcgcgggaccgtcgctagcagcaaccttgcggccctcgcgagcgctcgtgctcgtctttccccttccacgcagcagctcctctgcgtttgattccgcccgttcgttcgggtcgcggccgtgcttgattgccagctcgtccgtcgtacgccacaacagacgacggcccgcggtggccgacaccaacctaaccagccctcgcaacgacgtccaagcagacgaccctgaccgctcggcccgggcccgacaccgagctgccttggtcgcgaccctggcatggcggccacgacctatacgatggagagtcgtgtgcgaagcttaagcggctgtggggacaaggtgatgagcgttggccaactgtagatgcaagatcgagcaggcaaggacgaggtcggccggttgtgctacaagagaccgccgcagctgaccagctgacccgcttgctgactcgctcactcgctgacgacaacaggggtgtgagaaggaagaaccatgcgaatccggaaccaagggcatcatgagagggtcggtaaacaaaggaggggacgtacgggagggtgggagtgccccggaactggacctttcgcttctggggggagacgggacgggcgggcaggggacgagcgtcagccgcggtgagcaggatggatgcacacggccagaggaggatgggcgggagaaggggagaaggagggagaaagggagattatggatggatggagcagggagaggaatacgagcagacggacctcgagttgtccgttttggtgcgacggctgctagagcttgaaggccggtaggtagcgtcgcttggtgggcgtgtcagcggccaacttggtgggcgtgctgtcggcgaggttgacattgtcgagggcgtcaacaactttacgatcgacaccgtctcgctccatgtaggcaaagaatgcagcatgccagccgaatttggcgcaagcggcgtcatggagaacgatattgactgcaacctgcacacgggcgacggctcgggctgcggcgaaaccgactacggcgacaagccaacctagtgaatgcgagcggcttccgtacctagtccgctccctactgacttgctccctccctctagcggcaagcccttcaacgaccttgacggcggcgtctatgcgagtacgtgaaacgggcctttatcgctgcgccggtgtcttgttgacctcctcccaacctcgatcagtgctctgggacgagacggccgtctcggtctacttctttacccgcgctacgatcccggcagacatcacctcgtcagcccctgcgccctccgaggcttggggaatgccgattgccagattctcgagcgtcgtgcgacctcaacgctgtcctggttgaccattttccaatcttcaatacggcattgaaggttattgtggaggaatgtgaaggagaaggaggatggggaggagggtaggttttgaaggtagggcgagggagcagtagggaagaaggagtagctggtagaccggagtggatggtagtggttggtgacaaggcagcaggcaggacgcgccagggcaacaggagcggtcgcagggtggcttgctttgcggcgcgccttctgcttccagcctgctgccaggcaggcgacgaccttcgggacattgtgatctgacacaggttgagtctgcaaggtgatcagaggtcgctcagggtgcgccagagtcgaccgcggccgtttgcacccagccgcacagcttggatgactctgatcggcttaaggaaggggtcgtgatcgcgggtcggcgagaaggaaggcaaagatcgcctcgcctgagaccagaggacgaccacatgtgtgcgagagggaaggaaggaaaacggtcgcaggtaagggggcgtgatacagggatgcgatccgtgtcgggcgtgatgcgcaggcgagcagtaagaaggatgaggacgggcgattgcggagatggctcagacagcagactggtcgtccggcagcgcaggagtttccggcttgggatccgactcgtccttgaaggtaacctcggtcgaagtggagtggacaaggggtggcggcttcggttttgctgcggtcgtcgccgcgacgggggactgtggcgcctttgctgccgaagctgcccgggaaccgtcagagggcacgagagaatggatcttttcaaactgtcgcgttcgggatgcaaggagtgcggtcagcgtcggtcgcagtcgcctcactttggcagatcgagggcgccttggtcaaagcacgcaccaactcctcggccgacttgacggagccagtccgaatggcgagatgcgacagctcggcattctcgaaggcgctgaagcgcacccacttgtcctgccgctcgcagctcattccagggaagagggcgacgttgaggatcaggcggaggacaccgtcggcgcgcatgactgcgccgtcctcaagagcgggtcagcccgcgtcgtcaacccaacgacaaagccggacgaggacgcacgtaaccgcggcttggccgacttgacgttgacgttgaccttgaagatcccggtgccgcgctccttccagcttccctccttctcgagaacatatagcttgcagcgaacctgatgccgcgtgtcctcgtcctcctcgccggtaatggctggtccaagagccatacgccagcggtcagcgactggtacgcatgcacagcgacgtcaatccgagacgtactgtcctgggccgcgagcttgacaatgccctctccctcgctctcgtcgcccgcgctcgcggcctcgccatcggcattcgccgtgaggtcagcctctgcgactccctttgcagcggcctcgtccaccctggtcgaccgaccgcccttgctgaggatgtcgccgaagctagacgaggtggcgccggcgctcgtcgacgccccggcggtcgaaccgaacggcttcgcgttggcgaaggccgagaatgcgtttgaacttccggacgaggcaaccgagccgaagccagacgacgtaaaactggcgaacgtcggctgcttgggctttgccagaggtgcggcgtcggctctcgcagctctcgaagacgaagcgtcggacgtcgagttgccggtcgtagatggcacggctgacggcggtgataggggagcagccggagctgctggcggcggcggcgacttggacagccggtcctttgaggagcctgcagaagcagaaggctgcagtggacgtgcacgagacatggatcagagggtcagtcttgaatcaggagccgacgcctgcgagctctagcaagggcgacggtgctcaacggagagcagacggacctccgcgtcctccttgaccttcttgaggccgagggctgccagcttgagagcgctcatcttgtcgctcggctccatgcttccctcacgttcacgcttccgtccgctgccagctttgagatgtgccatacggtcaggtgccaggtggtcagcccgagcaacgcttagaggaggccgggcagaaaagccgatggaagggccgacgcaccagacatggccggaggtgccgtctgctcctctggggccgtcaaaacatcgacctgggcgtccgcgagtggcggcggtggtgaagaggaggccatggcgagatggttcggacagagacagggctgaaggcggtaggagctggtcgaaggtcgggcagaccctccccggcgacgagagcggcggcctcgtcgggcggccgcgaagacgagccgactggcagcgcagcgggcgcagattggcctccgctcgcgctcgctcactttctttcgacatggcagaagtatacgcatggctaacctgaacggaagtagcatgacaagagtgatcggcgacggacgtgaaagaggttgaggcccagcactcaaaacgcggctgcatctcggcgtccgccgctgctgatctcgagtcgcaacgggcaagaggcaccctcctcgacagtccgacgagcagaaggcgcctcgagaatcgtacatcgcccatcgagaggtcctaaggagtacaatgttcaatcactcggcggactagcttcccgattcgccgccgttgctgctaccgcccgagagcgatcggaagaactcgttgtacgcctgctcgatgtcaaagagcatctgtgtatgagggccccggcggcggcgtatcagcgataccgaaagaggcgcgagagcaaaggaccaggctgaaaggaagcgggcgcacttgcctgctctgctcatcagagatctcgtcgctcgcgctcagcgcgttgagcgtgatcagcctgaaattgggcacacgctgcgtcagttggtggagtctttccacaagagcagcgtatgacagaccaatgtaggatgcggccgcggccctcccattcgctcgagcccttgaagcgcgagtagccggccatgagatcgctcaagtaagggtgcagttgatccttggcccgaaggctcagcttgagagcgtccagcagggtgatgaacgactgcatcgatgcggaaggtgagtcagtggtcgttctggaagccgagcggccgagtgacaaagcgatcaagggggcaaggggggggggcgcacctgggtgacttcggcaacccacttgccctgctcgttgccgccgccgccgttctcgccatctccatcgcccccgccgtgctcaaccgtcgccggaacaccgaccttgagcctgtgaactgcagcaggactgtccatctgggttattgagagagctcgtcagcgctgaggggtccaaggtgaggtagggctcgggcttcaggcggtcaggggtgcgaactgacccggaagcgcgtcataaaggcctcgaggctagggaattcggacgacgggaggagtttgatgaggcccttgtactgggcgagcagtctgctgcaggcttgggtgtacctaacggcgaggggtgcgatggagagcagggcgagcagagtcagcaagcgcagctggtctggcgagcccgtttcgtcacacggagctttccgctgctgcccattcccgggcagagagcgggaagcagatgacgagactcactccttggcgcctaccgagtcgcgcacgtaggcccgttcgaggtactcaaagctgacgatgatcgagtaaagcgtgctgagcgagtcgaagagctcgcgctcctgcggcgtcgagtagagccggacctcctcgtcctgaggtagcacaggcgtcagcagctggcccggagcagaagtttgaattggactgaacctgcttacgaggttgagcatgcgtgaaccaggtttgagacggatcgtgagctttggaggtggctgtccaggcgagccgaaggagagccggcacgaggcagctgagcgagctccttgtcgcgcggccgcgcagcgcagcgtcgtcgcctgtcgtcggccacacttggcccagcgtctgcgactgagctgccgctaaccaaggccggagcatgaggtgcaaagtgatcatatcagacaagaagcaggggcagataggacaggcagacgagatccgacatgaaagatgtatttagggtagggccggtgcccagcagatcaaggggctacaaggatgaggggtcgtgagggaggatggaacaggtaagaagaggtgttggccggatcgaccgaggctatgtgcgcaggtcgccccggccgaacgttgcccgaccgccgcccgtcttgacgcgcccgcggtccatgatgctagtcttcaccgggacgctctcggccggaacgtcgtccgggaccgcttctgcaacggccgcaccgcttagcgagaccttgtcagtagccgaaagcggagcggtcgtgacccggactagaaattggatctcgcggtctgtgagagtcgccttgaggtcgcggatctcggcctgggcgagggcgatatctgtcaactcgcaagtctggcgacaagcggggagcagaaggtcggagaaacgcacttggtactctagccgctcagtatgccacgctagagcggcctcgcacagttcctgctcgagccgacgaatggccgcatccttgtcgtctccgaggaccgaagccgaagtcgaggcttctgagccaacgaccgaggatgcgtttgaccagcccgaggtggcaaagctgctggctgagggactcgacagcgaggagtggagcgatccgggcgacagcagcgtcgatgggtcaggagacgtctgcgggagtgacagaaagtcggtcggcaggctggccgtccacgcccgcgagatcggtcgaagcttaaggggcttgacgggcgctggcgaggccgtcgcagtagatagagttgacagagtcgactcaaatgacgcatcggtcgcagacgccgcgactgtacgcggtgatggcgttgtcgggccaggagcaggcggcgtcggcggccgagagggcgcctcgaccgaaagcgagatgaccgaaggtgacggcgatgccacaaactcggactcgccgcagcctcggacggatagctcggtcataggcgccaagaatgaataggcttcggccgccggttcaggcaaagggaatcgtccgctcgatgtcttctggtagtgcgccgccgagacgagagtcgtcgccttagcggttgacatggtcgggattggcgacgcagaggaggacaccgaagaggccttcgagaacattttgagcagggactttttggcacggatgaccctttgcggcgccgtctcgtgcgctaagggcgacggcagcgcagggtggtcgcgcgaggctgggccagcccggccgggaacgacgccagacttgtgttggacagtcgaggatgcttgtgctgctccagtcaggccaggcggacctctcgagtcgttggagaagccactcgaccgaaggttgccgacatcgctcagcggggctctcttgcgagcggctggcgacttggtgggtgtcgcactcgagaagtgcttgggcgaaggagacggcgaagggagtccgtgtcggcgtccgagggtgttaacagcaggagagtagtaggatgggatactcgacgagctgtcgccctcgtcgggcggcgtcgggaaggcgtacatggccgctgcgagcgaggtagagtgcggcgtccgcggctggccaaactgctgctcgcgagccgagatgggcctgaggtacatcgtcgtgggcggcgaacgactagagcggtggactctggcatcagccgcgggatcaagttgtcttgggaggaggtcggggctgtagacgtacaggcgggtgtgtccgctgtcgcgtcgctcgacgctgtcgacgtgggtcaagccgagtgcagcccagccagcctcgtggtcgccctcggtgttaccggcatcgctctgctgatcgaggctcgctgcgtcggcctcggcttcctcttcccaaggggcagagcgcgagcccttgcggagctgcgccccgaacatgctgccgagcccgccgatgctgtcgtccgagaacgtaccggcgacgcccgagaggcggccggccgacatcggtggggatagagcggcagtcttgaagacgagcgattgcttcagcttgagagaggtatggtgaaaaggcggccggatcggagtggcggttaagaggctgaggtgaggggaggctcggccaaaacaagtcgcgccggcgcgtctcgcgtcgtcgagaggcgctcgacgcggcagagacgtgcgcgtcgactcggcccatcgaccgcccacgtcggcggcggcgaagccaatggcggacacccaacaaaggagagccagacggcaggccctgagcagtctgagtacggcctgttacaaggctaccgcgatgaagctggaatgaccgaccagttttaaagcctttcaggtgctttctcgtacagcgccttctcgaatgtcgacggtctctctcgctgtagtcatacgcagctgacgcaacacccgcggcgagaggtccatgccatcacggcacgctctcttgctcgcacgtctggcctcatgccttggcctccttggccttgagcgacgtcgtcgagtttttgggcagctccctgaacgagcgagagcaggcaggactcgatgtcagccttcggaagacgatcgacgccagagagagacctcaagactgacttgatccaggggaggaacttgcggccctgcatgtatggctggaggacttccggaatgttgaggccctgagatggatcaaacggacgcgcgcaaggtcagcctcgccacggatctcaatgagaggaccggaagcgcacctcgggcgtctggtagttctcaacgaggcagcctgcgaaagagagggcgcaaaggcgtcagaatctgcgaaccagggcttcggaggtgtgcgtaaccgacagagggcgcgctcggtggcacacagcgtgccgttgagcatgtggacgtagttcttggtcgtctcgcccttcttcttgagaccacagcgaacctcgagcgaacgcgactctgcagatggacgaaggcgggggaggtcagcgcgcgtcagatgatcagatgggacccgcgtcgaggcggcggtagacacaaacggtagtcggctgggagcgagagagaaggaggatttcagtgctgaacagaccaaaggcgacgagggaaaaaggacgcactgcagttggaaatcgactggagctccttgtactcgccctggtacgggaaccaggcctcgacgtcgtacttgatggcagcagcgttgttgagcgcgcccgacacaatagcgacgacgcggtaaggcagcttgagcgactggtagaaggcctccgagttggccaccatgtgctcaaacatctccatcgacttctcgggctcggtgatgcagaactatgggcgggcgggcacagtggctgtcagctgcagacggcgtgtcgcccgaggtctcaccgacgaccgacgcacctgctcaatcttctcaaactggtggacccggaagatgccccagacgtcgcggccgtgcgaacctgcctcctttcggaagcacgtcgagtagccggccatcctgagaagcggcaatggtcggtgcgatagaggagggtcagtgagtcgctcgcggtcacaattccctaggcggactgacttgatcggtaggtcattcttggggtcctcgaaccactcgtccatgtacatgcccgagagcggctgctccgacgtggcgatgaggtacttgtcgtcctcgccgtcgaggacctggaaacacgccgcggggttagcagagcagcttcatatccgagatacgagcagcgcaccttgtagagttcctcgtcgaactgctcactgagaagggggtgggaagcaggaaacgtcagagccatcaggtcagcacagcagcgcttaccagagcaccctaggctgcggcagcagactgacagctgagccgtcttggccatcgcctccttcttcatgaagaacggtgcctggacctttttgtagcccttggtacggaggaagtcgaggccgtagttgatgagcgcctggttgaggtctacgccgtcgtcgatcaggaagaagccacggtgaccggcaatcttggcacctgtgcggtcagggacagaccagagagtcagcacgagcgacgagcgagatagacagcacgcagacgtaccccgctcgaggtcaaaagcgccgagacggtgaaggacctcgtggtgggcgatgatgtcggtccggagctcgggctgagcgtcagggccgtcggggtgataccggcggatgagcgcgttgtcgtcctaagtgcgaacaaagagccaaggtcaggccagcgtcgtccagcagcgccgtgtgcgactcacctcggtctggctgatggggcatccctctgcgacaatgttgccgatcatgccacagcgcgaccgcataacacgctcggcctcgatggcctccttcttcatctccactagctccttgtccatcgaagccttttgagcgatgagctcgtcggccgactccttggcctgcagtcatcggagaaagggggagtgagaggtggtgagtaagctggccttgggggtcaacgacgggcaagggcagtgttgccgccagacagcggtcgagatgaggcggaccttcttcttcgccgagatctccttctgaatgacgttgatctccttcgccttcgaggcggcgttgaagttgactggccaatcggcagcacgcggtaaggtcggccttcagtcggagagctcgaaaggaagctcagagacggacgcacgcttcgtccagttggtgtagcgctcgaggacctcgtcgacgagctcaacactggctccacgcttgcgctgcgactctcggacaacctcggggtcgcctcccttctccttctgaactgtgagacggcagaggcaggagagcaggaggtcagtcgagctcgccagggctgggcgcagcggagacggccgcccggcgcgccggacaggcaggggccagacagcgctccgtctggcgccgatatacggcagcggactaacgcataacgatgtcgatcatcttggacgcgagagagctctgttgagtaaatggtcgagtgaggaggatggacgacgaggggcagctggcatggcttcggagggacgagctcgcgcgcgggaaggtcggagttgccggctgaagctgtcggttgccgggacctcacagaccttgcgacaaaagtcgttctaggcgtacaaagatggcattttcagtctgcaggatttgtatagcaggtatgggtggacacaggggctagtgtagaataggtaagggcttcgattggcctctggggcgggcacgagcgacgagaggggctttagaggtgttttcgcggagttgcacaaaggcccaagttgatgcagctcctctcaacgtcccacctcggtgggacacacataaattcatatatcaatacagagaagattagcattgcccctgcacaaggatgacaaactttaccagagatggacggcagaaatgccacaattatttttgccgctcgatacctgactctctggccgtcgggtcggtcacaggcccgtcggtgcctctttcaaagccgaaccgccgctgaatcgagctcataaaccggcccgctgtacgacatcacgatcgtgattatcaatcccgctcccgatcagcaccagagggatacacggcagacgacctggtatgtgatccggatttcagccggcacatgtactggtctgccatatcagcgtcatcccagtaggcatactgctttgatatcggtatgtcataccagtacgataccaggaccggtactggtagtgtaccggtatgtccatcagtaccgtaccggtcggcatactggtatacattccataccagtatggttcgcccagactttgacagcctctcctgagcggagatcaaagctcattttagcgagacttggttactgttgacagcgccgcatcaggaagggatctgagaggttagttaaatggtatgtgagttaaaagttgaatatatatgatatgatactagtacgaacttactggttcagtaccagtaagcataccagtaccgcgacagtagccaaaccagtaccacaccagtaggtctaccggattgacttcagtatcgtaccaatacgcccaatggtttttttactagtacatgttccgggtgagacactggtatgtactggctcgccagccgtctacggtggcgacaagggtgctgcgatcgggttctggggcgtctgggtacccttccagcaccggtttgttcggtcggccacagtcgcgtttgacgggggttggttctggtcgatggctgatccgtaagacagcgaaggcctgagccgggacgacatggacgagggccggctaacatcagctaagcacgagacagcacgcctgacaaggcaggcgacgcacccggcgacgagaacccgtgagggcattactttcgacgctcttccgaaggcacgtgtacaagaagacccggccgacgagcaggacgacaaaagagcatcggttggagctgccccggcaggagaagcaggagacaatccgtcagcgtctgagctggagtagaagagcaagagggaccggcaccggtgtaggcgccggccgcggacgcactagggcctccctcggtcggtcaggccgagccgtcggtgggtccggtcgaggtcgaggtcgccttggggtgggccgcctccgctcctgctcaacaccgccccgagaagaagcctccgctcggccgccgccgagtaaggaagggttgattttgcgacgagtgcggcgcggcgcgcagagccagcggcggcaagcaggcggctgcgcgcgcgctggcggccgcgcgcctgccgatgcactcctgacgcacggactgcataggcattcctcctcttttctctctccctcttagcttctcccttttccccccctttcgtagagacctcagtctacttcttggtgactgaggtcagttcccacctttcgccgttttgctcaccgcttgtaacacgtcctgacccccactctaggtagctcattccgtttcgtccttcgcccaacaggtgcctagagtatctcatgtagagtccacttcttggtgactgagctagctcagtccgttccgttcttcgctcaacaggttatgagcccatagctttgtaggacgagacaggaggcagggccgactacagtgggggtgagctactgcctaggctaaaggggtgctagacttagggggggcgaacgtacctcagtctcaggactactccgtgaacgactgaggtttaggagggggagcgagcggtcgtctcgctaagaggagggagcgaaaagagagaggaggaaagagtccggcggactccagggcgtggcgcccgggtggccgctgggcggtcgccaggcgctggcggcgcgcccaggttcccgcgctgcgcccagccggtgccggcgcagcaacaccttcaacaagcttcatcccgaacctaccgatacgctaccctaaacgctacacgacacgacaagtcacgcgcacgtcaccaagaagttgttccgtccgcccggtctttcgccagctcgccgagctcgccccgacacgacctcccctacccactctaccccaccgacacgacccccgccatgtcaaagcgggttcacgagctcaaaggagctgaggactaccagcggtggtcgctcacgcacaaggcttgcatgcagggtgaggggctttggctctactgcctccctgccccgctgccgtccttgctctcaccctacctcatccccgagcccgacgtcgagaaggaccccaagggctggcaagagtggcagctcaacgttcagaaggccgtcggcaagacccagctcacactctcccgcaacatcaccctcacggccgcccacgccgatcacccggtgcacctgctcgcccacctgaagacgctcttcgccggcagctcgatgtcggatgccctcacgctccacgaccgctactcgtcgctccggtgcgtggccggccaggccgtccagtacctgaccgacatgaccgagctccggtcccagctcgccggcctaggcgacgtggtgtcggacgaaaagcatgcgctctcagtcgtccagggcctaaaggatggtccctacgacgacctccggcggcgcctcgtcgacttgctccacctcgagcccgaccgcttctcgtacgcggtcgtcgaacggatgctcctggcccggtcgcgcgaagaggaggccgagcgcgtcgatcaagccctggcggcgcgcatgagcggcatgcgcatcaaagcccaaggtcatgggcaaagccgacagcagcagcatcaacgcaagtccgatcaacaaggagggacgtcactcaccggttccggtcggtgctttaactgcatgcagttcggccacttcaaggtcagttgtcagaatcccacctccaccagcatccccgtcggacacgagacgaaggaggcttaccgagttcgaatggcggctcggcaggaagctcgtggaggggcgcgggcgagcgcgacgattgtagctggcgacgtggattcatccgattccgagtaccacgtcgtcagttctgctgcaagctcgttgaggagagaggcggccctgcgcgctacaagcgaggtcgtcatggcggcagtcgccgaaggaacgacgtacatcgactctggctgctcgcggtcaatattcggcggggccagctggttcgacccgcatcgtacaagcaggacaagcgcaagatcttactgggcgacgtcaatacattgagtcagtcggcagcggcacggtcgagatgcagaccggatcgcacctggtcgttttaaaagattgcttgcacgtccccagcctggcaggcaaccttctctcggtcgcccacctcgtggcctcggaagtgcgctgcgccttcaacgcacgcgggtgcgtcgtcgagcgggctgggcacatcgtcgccgtggtgcccgcatggtcgtccatgtacgcctgggacgtccgcccaggtgcggtcgtgtcagccattactatcagcgcgtcggctatcgacgaggagcctgcgcgccggcggctcggtcacgtcggtatcggtcgagtccgtcagacggcggcccaggttgacggcttcgagctgacgccaaaggagatgtcagcatgcgacgcctgcgtcgagggcaagatgacgcgacgcacctttagggttgcgtcggtcgctcgggcgagccgaccaggcgacgtcgtctcagcggatctctttggccccttaccggcgacggcaagcggccatcaatatggccttgtcatcattgacgacgcctctgccctgatcaagctttacctcctcaaaaagaagagtgaggctctggcgtgcttcgagcgttttgtggccgagacggaggtggcaggtcatcgtgtccgggtgctgtgttcggacaacggtggcgagtttgtcagcgcagcgattgactcgtacttggccggcaaaggcatcgagcgggccctcacctcgacgcatacgaccgagcaaaatggtcgtgccgaacgtgccgtacggactatcaagtaaggcatgcggacggcgcttcttcaggctgggcttggtcggtcgttctggggcagggccgctcggtcgttcgtctatgctcggaaccgctcggtcgtcaacggtcgcgttcctctggaggcctggacggggcagaaggcgagcgtcagcttcctgcgggtctggggttgcctcgcctgggtccacgtcgggcgggccgtgctgctgcgcggcgaccctccgaactctctcctcccgtgcaccgaaccccctcggctggtcacatcttcaaggactgatctcggccggacagcaattttgaactaggttcgctcggccgtccatacaatcgggctggtctgtccgcacccgctcgacccgcgcgagctcgacaagtcgcccgtcaaccgaccttgctcgacccttcaagccacgtacaccctcaaactggagcggagtgccaaataccaagctccctactcgtcggccacaccgtggtgggagcatcagctgctggtttgaccgagagcagagcaaggcagagcgaggatggcatgctcggagctcgagtcgcggcctggcgaacgagttgaccgtcgaccgccttggagtcacgtgccagccgacgtcctgtatcgacctccttcgctcgactcctcaaccatggccagctgaacggctcgccgtccagcctctccagaacaggagcgtacgcggctcaaggcggtccgaaagctggttgaggtgcatactggcgaccatagtcatcaagcaggagcgggagcgtcgtgcagcccccgaccgagcgagcgagcgtactttgactcgaggccgacagagacgctctaccagttcacaagggctggaaagggactatgtgatacaagctgagaggcacagaaacctccgagacgaaaatccggatgatccagaagaaagacagacagagggtgacggaaagagggcaaagtgacgagcgcgagcgacaaagcgaggctactcccagtcactatcctcgtcctcctcctcgtcggccgcctttgtcgaggcgggcgccgagccttggaccgtcggcgccgggctgctgacgactgagggcttcgtctggccgctcgtgttgctgacaatgtcgtagctgctgccctcgctcgaatcgcggggcgacgtctgcgtcgtcggaggcgcggctacggcctctttcgcttcggcaatggagcccacggcgacggcgggcgaagcggccgaaggggtcggcgtcgtctgccccttggggacagttgatgaatccgggacgacgggcgacttgccgagcgctgccgtaggcgtcgccgtcgcagccgtgggtgacgccggctttgcctcgtcttcgtcatcctcccatgagaagtcgtcctcggcgtcgccggcggtcgtcgtgtcaagcagggtggcccgacgctcggcgtcgagctcgatctgtagccggcagcagagtcagtgaggggtagctctttgaaagcgcgcctgaggggctgcgcacctggtggacgcggaagaaatagcgcttccagaaggtctccttgtccatctcggccggcactgcggcagggcggaaggcaagtcagccgcgcatccttcgagtggggttccggatgcgtgcgcgaggctgaccgagctcgtcccggagggtcttgaactcttcgacgcccttgtccttggtcggcccgagctcggcccacgtcttctcggtccacttctcgccctcgacgccgccctcctcgacgaagcgggccgagaagcgctcccaggcctcgcggatctcggcatcgacgccctcggtcgcgcccgggtcgacgagcaggagtgagcggttcgaccggagcgcgtcgagcgaggcgaggtgccgcgtctgccggacggccgcgagcgactgccccgtctggcgggcgacctgcgcgtcggattgggcaaattggagccggccgccccgggcattgaggtcggagctcgcaagcgggacagcccaggcctctgctccgtccagtgagtatgcgccgtcggttgcgccgtcagtcccagcggtcgggggcacgatcttgatcgcgtctgagaggaactggccggcgttggtgaggaccccctcggacttgcgaaggtactcttcggcgagccgctcggcatcggcgagatgcaggtcggtctggagcttctggaacgttgtggttagcgacgcccggagatcggcgacgttgagcgtcgccgggttaaggtttgggtgcgcgccgagcgtcgagctcagcgactgctggaaggctgcgagcgagggcaggccgccgccgccagccgtccctggaatcggcttgccgtcagcgtcgagttccggctccttcgccggtcccttcggaagcgacgcctggagcttgccaaagaggccagagagggcctcgccggcctgctcgacgcccttgcggacgtcctcctcgagctggctctcgcgcgccttgcccttcgcgtccgactcgacgctcaacccggccggcataccgcccatgcccatgtcgcccatcatcgccaggccggcaaagctctcgccgccgccagacccgccggcggcctcgctcgcggctgcctgggcccgagcctccgccgcttggacctgcaaccggttgagctcggccttggcctgggtcgctgccgacgtgagatccttctggacggcagcgagcgtcggagcgacctgtcgtggacgtcgagagggcgtgagcttctgccagatggctgcgagccgggatgggcggccgaccgcacctctttctggaccttgccccagaacgagccccacgacttcatcacctgtccgacctcggcttcgaggcccttgacgaagccctcattcttcttctcgccggcatcgagtgttgcgccggtcgaggacgaggcctcggcgttcgtctgtgatgaggagctggcgggtgccgccgccggcgttgcgtccggagcggaacgagaagggagcggcgtcgtcggccgagcgatggccgcctcggcagcggcagcggcgtccatgcgtgcgcggtctggtgggcgatgtgcgatcttgatgttggcgatatggatggattatggcaaaagggcgagatgactgttgggagggcgactcggctaggctgtcgtctcggagagttcaccgagcggaaggcgagcagcatggccgagagacgagatggtccgctccgacagtcatcctcctcctcgacacctcactctgatctactgcccagctgatcatctgcgtacgtctgccagccgtcgttcacgtaagtgcaaagcgcccgaggcacggtctccggaggcgcggccgaccagcaggcacgccgcgcgcctcgcagggtcgagctaccgacgggctcatcaccggcaagtaatggcggatggcaggctcgtctcgtcaggctccggtcctgacggccacgagcaacacgagaggcagctccggcgttcgctggcttcggatgtggtgagaaagctcctgctgggcggctgccggtcactgacgggcaccctgtcgcccggccaggcgagctgaccgtctctcgtccggccaacacgcacccgaagcagccgtctaccggtcgcttgcaggcgacgggcctcctcggccctcgctgcagtcgtcctgctccagataacctttgctgacgacgatcttgctccagccgggatccgctgacccccgttgccgcctttagtggccttggctgagcgcagacgtgccaaagcagctctcttaatcgtcggccaactcccgcttccgccctggctactcgctccggacgcaggccgggaggacggtagacgggccgtcgggcacaaggttgctggtgttcggcatgagtagagacgagagcacgcggttcgccgcaccgcttcggcatcggccggagcaatgggcctaggccagaacgtgccagttggcaactctgaccggctgtggccgtcttgcccggtcaaggagagatgcatggtgagtggtgagctcgacgctcgaggtgggatcgaaatgctcagatgggcaggtgggagcgggagtcgtccggccggtgcgcagcgaggggcacggaggtccgtcgtcctgccgtttccgcgctttagaggactggcctgacttcccgagcggtacctgcgctgcgccatctcgctcgtacttagcgcaggccacaagctgaggtgcggcctgctcaatctcatccacccttccacttcctcccttcgcctccttcttcaccaccacctcctcccgcaccatgtcgtccttcaagtcaaccctcgccgcaaattcgagcatcgccgccctccgagtcgcgccccgccagcaggccgacgtcaagcacggcagctcggtcctctcgagcacggccgtcgggcccatctcaccgccggcgtctgagactaagcgcaccctctcggtcacctcgtccgaaaacggcggcgtcgttactcgccagagtcgcaagacggccgagccgctcgaggactacaagggcgaatactcgtttgcgcccatcaagggtgcgttctggtcgcgaagcctcctcttcagcatctgctgactcgtccttctcgtttctgcttcgtgtcatcccttctagagtggcaggtctcccgcgcgatgactcggcgctactacagcgacatgatgacgacggccatttcggacgtcgtgatcgtcggctgcggcagtgctgttggtcccctgctcgggccccgggccgtcgatggcggtcgctgatcacggaatcggccttttcatccgcagggtctctcctgcgcttacaccctcgcgaaggctcggccagatctcatcgtcaccattatcgaggctggcgtcgcccctggtacctccgatccagcgccttacgttgcactccgcctccgactgactcagctcttctgcaggcggcggcgcctggctcggcggccagctccagagcgcgatggtcgtccgcaagccggccgaccgcttcctcgaggaggttggcgtgccgttcgaggacgagggcgactttgttgttgttaagcacgccgcgctctttacggcaaccattctctctagcgtcctcaaggtacgcagccgcccgaaaacaagctgcttctaattcgcagactcgaggactgactcatgatcagctacattcagatgcccaacgtcaagctgtacaacgcgtaagtccattcgctgtgtcggctcgtttaatctctgcctgacacctgccccttccttgatcctccaggaccgctgtcgaggacctcctcaccgtcgaggacccgctcgccaccaacggctcgatgcgcgttgcaggcgtcgtcagcaactatacgcttgtgacgcttgctcacggactccagtcgtgcatggacccgcaggtacgggcggcatcgtcgtgtatgcggcgcctcgttcctgacttgcttcatcatcgcagacgatcaccgcgccgattgtttgctcctttgctggtcacgagtgcgttccattctcgacactccccgaccgacccgacgtcgctgaattcgtggttatctctgcctctgctactttcagcggacccttcggcgccttcagcgtcaagcggctcgtcgcgacaggcctcgtcgagaagctcggcggcatgcgctgcctcgacatgaacacggccgaggacgccatcgtcaacaagacccgtgaggtcgtccctgggctcatctgcggcggcatggagctttcggagctcgacggcgccaatcgcatgggtgagtgcgagacggctagcaataacgttcgttccacggcgctgactgaagccgcttgctcaaccctgccaggtgcctcgtttggggcgatgtttgcgagtggcatcaaggtcagtccgtctgatgtgtagcgagtggccttgtcgccctccgcttcgcccccccccctttggggccccctcgctaccgtcactgacaccatcccgtgatggccccttgcaggccgctcacgaatgcctgcgcctttacgactcgtacaagattgtcgacggcgccgtcgtcggccgcaaggagatttgagtcgcggcctcagccctttcgtctcgctttttctgcccttctctcctccctcaccctcgccctcgaccttctgccgtcaaaacgtgatcgatgcatacaatggttgctagtggctacaaaatgtgatgattctccttcccgtatcctttcgttgattctagcagcggtcgaagaggccgacgctgcgactgcgctcctggaggaagcgcaccccgcccggcatctcccacggtcgggacgccgggctctttgtccgcgtgatagcgtctgcggtagagctcgtcggcgaagtcatgccgcggaggccgaggccctcaaagagctcgccgatcgacgaggcgctactgtctttgcggccgtcgacgatgtgcgtcgcgtcgagccggccctcgtcgacaccaggtgtcgttaccggcaagtcgtttgtgtcctcctcggacgagaccgagtcgagccgctggccttgagtgtacggcgtcggtgggtagtcgcgttcgccgtcttcgacaacgatcgaggcggtggatgacggctggcgctggcggttggttggcgcaggtgtcgcggttggcgtccggtcgtcctgctcggcggcggtggaagcccggagggtcggcatcggcgtcgacgacttcagcttgcgcgcattcattgccttggcgagcttgccgcccgagcccgatgtcgagctcgaatacgagtcggcgctgcgtgcctcagaccggccgcgccgaggctcgtcgtcctcgtcgtcttcgttcaagctcgacttctggcgcttggtactcggccgcctgacaggcggcagcttgagcgggatcggaacggcgggagccagctccttgaaggtcgacggcagcggtgctgacgagatgaagggcgttccggcgtcggttgagcccgacggcggggcaatggagaaggccgcgcgcaaggccggcagggcggccgggtccgagcagtggatcaggacgaccgattcggtcagatgagccgggtgatgatggagcggcaggtgcggatgcccgtagccgctgctcgtcgacgaccggctgagcgacgacgcccggctgttgacggctgtgatggaccgcatgcgcgaggacggccggacgttgaggcctcgcttcccgacgaccgcagagtgaatcgcatcgactccgagtgatttgcccgaaccgagggccggcgacagaggcggagacgagtcggtcgagatcgagccagacgctgagccagaggccgagcgctcgcgtcggatcgacgggtgccggctgacattggcggtagtcggcgtcatcagacccgagtcggtgttgagggccgacaggccggcgtaggtcgaatgccggtgctgcgccggccggcgaggaccgtcactcccgccggcagtcagacgcgatgagagctcgtcaaagttgaggtcctgggcagcagaagccgagccggcgggcggagggtgcctcgacgagccacgactgcggctgccaccgcgtcggctgtcgctccgttggcggcgctggcgccgttcctcagccacggccgccgccgacggaccggagaagcgcatcgcaatgaagaagacaacgaaacgagggctctgcttgccgtcctgctggcggctagtgctcgtcgaacgtcgctgcggcggcgtcggctgttccggctcgggagccggcgtgcgcttgacaggaggccgagatgtcgtgcgaaacatcgcgttggctgagctcgatcgaaagagtgagggtaggaacggacgacgctccttcagcagaggctggaccgggacaggagccgggagcggtggcgacggaggcagcggtggcagggtcacgacacattcgaagatggtcgccgagggcggcccgccgaccgaggggatcaagtcaggcacgggcgagacaggagctgtgctagacgtcgagatgggcgacgagctggggagggggaagtagctgtgtattgagcggattggcgtgcccggagccgacgtcgcttggacctcggtcgaccggacgtgatagaggatgttagccgagcgcaaggcgtactgaggggaaggaaaagagatgtgagcggacagatcgctaggaatttcgctcgagacaactcgcaccttgagaaacgagacgaccttgaccggatgctgatccgtcggattacagaggacgagcgtcaactcggccggcggctccgggcctgcagacactggcgtcggcggcagtcggggtgatgccggcgtcaaaggcatcggctcgagcgccagctgcagcggaagcgtgtacttgagcgacgcattcgaaaaagtcgtctgcttgactgttgggcacggcgaggagcgggggttaacaacaggctcgcgaatcaagcaaggggccgagacgtacattcgcgcggccgctggaagcgctcgaggctttcacgaacgtcgtcaccgacgtcaaagtcttggaggacctgcatgcgtcgctcgccatcgaggtcgagcaggccacggagcgtctcgcgcagctgacgctcggccgctcgcttggccgcgtcttcgctgttcatgacctgatgtgagacgaggccgaggacgtcctcgacccggccgcgcatgaccgtcagcgccttgtggccggtgccgaccgggtagcgccggccggtccagcagcggagaatagtgagggcgatacaccaggcgtcgacctcgggtccccagtagtggacctcgccggccggacgtgagagcgaaaggacgatctcgggtgagtgaaaggcgggcgagccgcagcaggtcgaaagcttggccgacgttcgcgagaagggcgtagcgagtcccatgtcaatgagcgtcacatggcccgtctcggggtcgacgaggacgttctctgaaagacagcataaggcgtcagcgccaggcagggcggcaaatgagagctcagcggctggacgcacccggcttaatgtcacggtggacgacgcgatgcgagtggagaccgtcccggacgaccgagacgagctgctggaggatcttgaggacgagtgcgtaaggcagccgctgctgcgggtaccgcaagcacagcgcatcaagcgagatgtgtgtcggcaggtactcctctgcgggagacaagcgaggcgaacgtcaggcttgggccgctaggcaggcgcaagcagccggcaactcaccgataaggtagaaatggccctcggtccggatcgtctcgactgcaggcggacgaatgcgcgcggtcagcgtttaggtgcttcgagcacggcctgcgacgagcgcacgcagactcacagacgcggacgaggttcggatgcggcgcaatctgcgcgagcagctcgggctcgcggatcagccgggtcgcgatcagcggatggtgtgggtgcagaggcgtgtgcttaaccgcgaactgttgtaagggggcgcaatgggcggcgagagaatgtgagggtcagccttcgaagcccacgcctgctgggactgaggttgtgtggcccccttgacgtcggccggccggcgctgcgcctcgctcggtgtcgctgccgggcgccggccaagcaggtctgcctagcccaccctctcgaaaaaggaacgcacctcctggccggccttcgtcgcccgatagacgacgctgaacttgcccttgccgaggagcgggacgttggggacgaccgtgtagtctccgataccgcgctcgaggagccggtccgggctcgggcccgagtcgacgacagtcggccagcttgtcggctggcagacggccgcccaatcgtctgccacagagagagcgacatgggtcgtcgggctggtgacggagctgctgccagtcggggtcgagatggacgattgggcagcaggaggagcagcagcagcagctggcgttggcgttgactccgggttcgggctcgggcaggtgggcagccgccggaggaggtcgcccgctgcgccagggtgtcgatcggcggtcgactcgggcggcggcttgacggccatgcgctgctggagaggacggccagatgggaaagagagaggagggcggcaggcagggagtgaaggtgggcgttggtagacaagagtcggccgcggtcaaggggcaaaggaggagggcagctctatcgtcctcgcccccccgcgcggccgacgcggggcgagcgcgacgagcctcggcttctccgcggagcgagccatctgcgccaccgacggtatcgtaatgaactgccgaagcgcctgagaggtattcgtgagagtgatcgcgtcggcaagcagctgatagctcgggtatctgtgagtgagatggcaggacgagcagtgccagggctgagagcgtgtcgaggctgcatcctgtcggaggcgtcaaaaaaaaggagaagctctgcgcaggcggtcgccctctcaaggacttcgcctcgttaccaagttcgcccagtgcaggcaagacgtaccctgcaggtcacgagtcgcctctgactgcgacgacagagaggtgcgacgtctgaaccagaagcgacgttcgttttgtcgtcgccagcggatctgctcgggcgacgtgcgtggcgtccggccgggacgagtttggtccgcccgccgagagattgccgcccgccttcgggcgtcatgatgaggcttaaggagagcagcaaacactcaagctcggggcgacgagcggcaacagcacgactggacggcaccgttctcgtgataatcttgaacaagagcaatctggccgacaccgattcatcctcggcaagggtgctgggagcatcgaccgccttcagcagcgcctggcgcgtctggccggctccgtcacgcagacagctcctcctccttgagccatgcctgtcggctcgacggccagcttcagctctcgctggacagatgacagcagagcagccttattgacattaccggttcaagcgagaggcctgtcgacccgaccctcccggccagccgtcggagccggagcgcggctttgagctgagagctgctctgggccgtcgcaccctcccttccgaccatcaccactccctgcagatcgataactccttgtccttcatccgacctcctccgcgcaatgtccgagccaactcccttctctccggccttcgccaagaccgacgtcgaccggatgatggccaaggtccgcgacgcccgtctcccgccggggccggtcctccctggcacgagctgggagtacgggaccgaccaccgctggctgacggacgtgcatgccgaatggaaggagggctggtcgtacgaggctttcgagaagcagctgcagaggtgaaaagctcctttttgaccgcgcctgcaatgggtcgacgaatctgctcgctgctcgctgacatcacctccctccgccgtcacgcgcagcttcaagcacttccgggccgaggtcgatggctcactgatccacttcatccacgcccgctcggatcaatccgacgcgctcccgcttatgctcatacatggctggccttcgtcgtttcttgagtttgtcgaggtcatcgacgctctcgcgaacccgccggcggggtcacaggcgtgcgtcgtctctctcttcgaaggttgagcgctgctgacggcaaagcgctgctgacaattcctctcgtctcgtctacaggtttcatgtcgtcgtgccctccctccctggctttggcttctcggagcctcccgttcaacctcagacggccaaggacgtcgcgctcctcttcaataaactgatggtcgaatcgcttggctaccgtgcgtcccatctcgggcctctctctcgcacgaccatgctagcttctgactggggtttgcttctcttggaagcgtagatgtttatgcgacgtcggccggcgactggggaacggccgtcgcgatccagttgctcagcctctttcccttgaacgccaaagcgggcaacttcaacatgttattcgccgacacgcccctcctctcgctcggctctgccctctcgcttctctccttcgtccccttcctcccgggcgccgtcgtcgactacgtccagagcttcagcctcgacgcgttcgagcggtcgacgctcgagcgctcgcaagtctttcgccagcaagggacaggctaccagaagatccagggttctcggccagggacgatcggacaggcgctgtttgacaaccccgtcggcatccttgcgtggatcggcgagaagtttcacgaatggtcggacccgaaggcgccggctgggccgtcgcgggtgacgccgactcacattcttaatcaggtcgggcccttctgtcgagtctgtccccttggaccgcgtcgtccgctgactccttgcttgcgtcgcgcttcaaaggtcgccctctaccacctgacgggaacgatccacacctcctgcctgccgtacaaggacttcgagagcaaggccggctgcggttacctgacgaccctgcccaagtcgacgccggtcggctacagcgcttttccttacgagatctagtgtgtccctctggttgcctctctctctccccccttggaagctgacgtgcctctctccacctccagtcagatgccgaaggcccactacgagcactcgtacaatctcgtccagtaccggcggcacagttttggagggttagtctgaaagccctttcgtagcatgccgaccctggtctgaccctggccttttggcgtctttgcaaagccatttcgccgccgtcgacaatcctgcggcctatcttgcggacgttcggtcgatgtttggcgcgcatttcccacggaactgagcctggcaaaattccttcttgaacttacctgctctacatgtgctttcagactcgtacttgccacgagatggatttcatgaccgaccgggccgacgtgattggcccgcgtgggtccgcggccgacggctggccatcgaccgtttggagtgctgcgcgccggctcagcgcgtcagccctccctccctccgaagccctccctgctggccatcgctgtcgcccgtagccccatcgccctcttcttcttctccctctcgactcccactcctcttacttgctgcatgctccagcgcctcttcttgcagaccctccttcgtcgcacacccacctcgctcaagccgaccccctaccttccgccctcccgccgcagtttcacccgcttcgccccgatcatggccccgacgactctcgcggtcgagtgcacgcacgccgagctcaaggacggcgagatgaaggaggttgcctttggcgacgagggcaaggtgctgctctccaaggtcggaggcgagatctacgcgacgagttcaaaggtgcggcccggctcggctcgctcaggctcccgccggccatcggcgctgacctgcctgcctgcctgccaccttccgatcgcagtgcacgcactacggcgctccgctcgtcaagggcgtcctcaccggtggaggccgcgtcgtctgcccctgggttcgtcgacgccatcaggcctcattcaatgggagagctcgctcgatcgctgactgctcccttcctcccttgcagcacggcgcctgctttgacgtcaagtcgggcgacatcgaggacgccccgggcctcgacgccctccacaagtacaaggtcgagcctgtctctgagggcgaggacggccggatccgcgtgacggccgacatggcggtcgtcacctcgaagaagggccgggtgccatgcgccgaccaggccaaggtcaaaaagcatgcgcgctcgggcgagacaaagggcgcggggaacgacgagcgcgtcatcatcattggcggtggaagcggtggtgccggtgccgtagagggcctccgggaggtacgtcgccctcaagcggccttgcccgctgtacttgactgacagcgttgccttccctgcagctcggcttccagggcaagatcaccatgctcgttcgtccagggtcagaaggcaggcgatgatcgatgacccaaatgctaacctcccccttggtgccttgaacagacctcggagccgcacccgccgatcgaccggaccaagctcagcaaggccctcatcaccgacgcgagcaagattacgctccgaacgctcgaagagtactcgtcggcgccctttgacgtcgacctgcgcgtgtcaacgctcgtcgagagcgtcgacctcgaggccaagacgcttaagattgatggcggcggcgaggagaagtgggacaagctgattgtcgcgacgggccggaagccccggagcctgccgatcgagggcaaggagctcgaggggattcatctcctccgtacgatcgagcacgccaaggccatcgacgctggtacgtccctccgtcccccctgagcaatgggcaagtcggcaagtcgttggcactctgctgacggctacttctgcgcctgacagacctgcaggagggcaagaagctcgtttgcgtgggctcgtctttcatctcaatggagctagccgtcctggcgaccaataagaagctcgccgggctcacagtcggtgcgtcctcctcgcggtcataagttctttctccgggcctcgagctgactttattccgtcgcccatcgacagtcggcatggagtctgtgccgttcgagcgggtcctcggcaaagaggttggcgccggcttcatgaagaacctcgagaaaaagggcatcaagtttatcatggaggccggcgtcgagtcgtttgtgccgtccacgaccgacgcgaagcgcgtcggcggcgtccggctgaaggacggccaggtactcgaggccgatctcgtcgttctcggcacaggcgcggcgcccaacacgcagctcctcgagaaggccggcgtcaaggtcgaggaggacaagacggtcaaggtcaatggcgccctccgggtcgccggctttgacggcgtctatgcaatcggcgacattgcgacgtacccgaacccgtctggcggggccgagagcctgctcaacatcgagcactggaacgtcgcgagcaaccacggccgcgcggccgcacaggacattgtcggcggcgccggccaggccaagtttgacaagacgcccatcttctggtcggccctcggtgcacagcttcgttacgccggcaacggaaagggcttcgacgaggtccacgttgacggcaagtccgaggactttgatttcgccgcgttctacgccaaggacggcaaggtcatcgcgagcgcctcgatgggccgtgaccgtcagtccctccgttttgtcaggcgcccacttcacttgctgatctccccgcccaaacacctcgcagcgctcaactcgaaggtgtcggaactcttccggctcgacaagatgccctcgctcgccgagatcaagggcggccagtcgcccctcgatgtcgacatctcggccattcaggcgtgaagagccgtcgcgctgccgtctagtccttgccacccgcccctctcttgtatttctcggtctctgcccttcgttttgctgtgtatcgataagcttttgtctcgagcgcgcccgagcaagacgcgtgctggaaaggtcatgatggaagagagcttgagtggagcgggaggtcgtctaaggagcgagcgtattatgatccggagctacggggggtggtggagggagtgcgtgcaaagagaggcgaatggcgggtggatgcgctgtatttcgctcagagactggcgagcttcttgtaaagccaagggccgacgaagaagatgagggcgacgatctgcggcgaaggggacgcaggcaaaatgagcctttgagcaagcactgcgcacacagtgaaaggagaacgcacgagaagcggattgacgccgccccggagcgtcggctttggctcgacaacctttgccgcgccgccaagggtgtggccggtcgtcggccactgggcgccgccgccgccagagtagagcgcaacgagggacgttagcttcgacgggttggcgccgcggagctggcagcaccgggatagagcgaaaggatgtagatcagcttgtgctcaagacccgcagtctcaaggcttacgcacgcgctcgacctcctttccgctagaaaaagagagcagaggagccactgtcagttctaagaaaccgtaggagggatgacggcgccgcgcagcacgtgctgagcccagtcgtagacgagacgttatcagcggacgtacttgcggaggaacacaaaggtaggcatcgcgctgatgttgaaccgccttgcgacggcgctgttggcgtcggtgtcgaccttgagaaaggttacggcggggttcttagcagcgagctgctcatagacgggcgcgatagccttgcatgggctgcgagagcgacaggggagcggcgagcgagggcgaacggcagtgtatatcagcctccagctagactcagcgcgtacgatgtggtctcaagcaacggcacttggcccaggagtttaagaagaccagctgctggtcggcacgagaccgtgcttgcagcagcgcggatgagatgaccttggccaacagccttctcctccacggccgctacactgcttcccgatcatcaaaatgacagacgcacccgcaccacgtcgcccagaagtcgctgccaagatggggagatggcggtcggtcagcatgtacgagcggatcacgcgccagccgaccagcgtcgtggaagccctggcgcctctgtgcgcatgcgcggaaccgatgagcaagcgagcacgacggcgagccgatttgccaacgcagtcttgtcggctcgacactcaacaggaagcgatgaacgtacacgacggtgatcccactcttggagacgagctggtcaaactctggcggtcgggtcggggccgtcagaagacgggaaccgacggtgtgccgcagccggtcagtccagccagcaaacacactcacgcgtagacgaacctgcctctcgcaggcagcgagctcgaacacaacgcacgggtctcggtggcggcggtctggacgggcatggtgactactgggtgttgatggcggcggggagggaagaaggcaagggtggccgtcggctggctcctgacagggcaaggtcagcccgaccggccctcggccgacgtggccagggacgtggccgccggccacatcgaacgaggccgccgtccttcgtctttgctcgaagtcgggtctcgctcgcagcagatcttctagtaaagtgcatccaaatgtcggtccgctgtctcgttgctcgcaacactggcgcctgcgccttgaccaggtttggacgaccgtcacagcatacgctcggccggcctgtcagccgaaacgccgtccgtactctcccagccatctgccagccacgactcgacctcgctacaaagtcttccgagcgggtcggcgccggcccgccagaagtggtcgccctccggcagctcgaccgcccgggtgtgactgcctgctttggccgtccaggcgcgggtggttgcggccggggagaagatgtcagccgtaccgtagagcacgagagcatgctcgcgtctggatggtcttgccgtcgccggagggagagacagagtcgtcgagagggccggtgtaaggaaccaacggaccgagaggggctgttgatccagagccaagtcagtcagaagacgcagcgagcagagccagagccgactcactggcgacacgagtagcttgaagacattcagcgaacgtaggatcggcttttgagcgagcgcaaggagcgcgccatgcgagtagccctggagtgtacgatggatggtcagagttgtgcgccggtatcgacataaggagcagccggtcgactcacgcagataaatacctcgccctcctttgttgcttcaccaagcacttcacgcattccggcctcaagcacctcggcatagtcatctcgctcccctgcgcccatccagctcggcgagcgttccgtctggccggcgccgcgcgagttgaagaggacggtcggtatgccgcgcgagatcaacgtcgttgccagctgctgtatgactctggaacggtcgccagagtatgttagcgagtgagcggggtgccagagagaacccagcgacgaacgggtcgttccaggagccacctaggcgggcccacgggtgagcgacgacggcgagggtcccgggtcgccaggtgttgggctcaagcagcttgacctcgatccccgggaccgacagcgtgcgagcgacgacacccgacatggctggagcgaggtgtagcgatgtagttttcgagagccgcgctctagagccgactcgtaagcggcattatctgtggtcgtcggtcgtacagggaggaaggtagctgtcgagccgcttcgcctcgtctcgtcggctcgcccgagagcggcgcgcagcagcctcgaccctcgacggcgactagcatgcccgaccttctgcttcctccatggccctgtcaggtctgactggtgatgtgagagccggctcggcagccagtgcatcctctgactcctcgccaggtcatcggaagcgggacgtcggcaggagcgagtcaaaggccaggtgccatgcgggtccggccacggacgaccaaacctcagccaaccgggccacacgcgtgtcgccgctttcgtctgtcgttccctttctatctcctcgacgacgaccttctcttcctttctcgccggcaaaaacgacagcgcctcaaggaacggatctcgctcatcaacttgcctctagcggcacacttccttccagcagccatggaccgcatcgccgtagctccggcgcctcaccgagccttcggtctcgccagcctcatccacccgcttcgcgacggcccggctctcgacccgcccgagtcacacgccctcgtcgaccaggtcaaggagacctttatgtcgaccgcagcgctcgccacgaaaaggtgcgaatgaggagcgcgacagctgagggctgtggaagggcgtgagcggcgccttcgagttcgagcctaggctgaccctccaacctctctcgtctggcaacatgcggcgtcgtaccatctcagccctcaccaccctcagaagttctggcgcgacccgcggactctcctggcgctcgtcggcttagcgtcgctcgtgctgcttctcggccagttccttctcctaccggctttcggccgcctctatgcccgggcggcctaccgcgtgcgcacgctccgtcggctcgctgccgatgagacggccggcgccgtctctgccccgccttccgaggccacgaccgaggtcgggagcgagaccgacgtcaaatatgtcaaggagggcctcgagacgagctgggtcgcaaagaacggtggccttgtcgtcctcgcctggcacacgctccgcttctcaggcctcgtcgcgcttgtcgccatgactgccgtctcgattggtctcgctcgcggcggacgcgaacgcaacgtcctcgtcgcactcacgagcttctacgtgcgttcattcttggcctttagtggtgggattttacttcagctgacacgactcggccgtctcgtccgccgcgcaccgcgcaggcctatgcgctcaccttgtcggtcctgagcctcttcgtcaagccttcaatcttctcggtctggacatcggctctcaaatttcatctgactgtcattctgctcgtcggtgcgtgtgcggcagcttgatggtggccatttgtgcgaatcggggggccgaacagcgacacaagagagctgaccgcggcccgtctcgcctgtagcctgggccgtctatgcgaagcgcgacatttacccgctgcttaccttcaccgagagtgcacaggaccgcctgaccaccttcatgtggatcaagctggccgtgagtcgttttggctcgtgcgcttcccggcggccagctggaccccgatctgatactctcccgccgacgaccaggtccttaccgtgaccgccctgctgccgccgttcctctgcccgcgcgtggccaagccggtgctcaacctgcagcgtctctacccgcagacggcggagcagcgctcgtcctatgccgagattctcttcttcaccttcctcgacccgctcatcttcaaggcctggaaggtgacggccctcccctatgacgagttgccgccgctcgccgacaccgacaccgccgagcacctccgcaaccggatgatgcacactctcgacccgctctcctccagcccgcgcgcgatcaagggccgccggcacctcggctggcgcatctgccaggcctggtggaaggaggcgaccgcctgcctgctcctctcggtagcctacgcgatcgtcgagttcttcagcgttattggcgtcaaccgtctcctcggctatctcgagaccggcggcgagggagccatcgtcaagccctgggtttggatcgccatgatcggcgtaggaccgtacctcggcgggctcattttcaacctccatatatatatcaggttcgctttcctctcttttcactccacgcacgcaggcagaggtccgctgtttgatccgtagagctgaccaccctccgcccggctttgcagtacacgcttcatggcccaggccgaaggtatcttgacgaccgtcatattcgagcactcgcttcggatccagctccgcgacgacggcgtcgacaagaagaagggaactagctcggccactccgtccgaggctggtgacgactcgttggcgaccgatgcgaaggctgaggagagcgaggacgacgagggcgaggccaagggcaacctcgtcggcaagatcaacaaccttgtgagctcacaatcttggaaaggcgaggattttcgttcgccgctaaccttagggccccgcagatgtcgtcagatcttgactcgctcatcaacggccgagcgctcctcatgtacgtccaagctctcgggcgaacatcctccaaggctgatgcgacctttcgctcgacagtgacgccgtcaacgcgccccttggcatcatcttctccgtcattggactctacgccattctcggctggtcaagtctggcgggattgggcttcctagtcctgacgaccccgcttccggccaagctgaccatgctccagcatgggacccagaagaaggtgcgcagaggatcgcctggaggatcgtcctgggcttcagagctgaccctgcctctcgctcgctctgccggcagttcaccgacgccgcggacgcgcgcgtcaaccgcatcactgagagcatcgccggcctccgcatcgccaagatgtttggtatcgaggccaatgtcaagaggtcagtcctttggcgtgcgctacaataacctgctggcgcagcccgctgatgcgctcgaccgacagtgagatcacctcgctgcgtgccaaggagcttgcactcaaccgtacgaggaagctcctcggcctggccatgcagatctgcaactacacgctccctctgctggtcatggtcgtcacgttcggcatcttcagcaccatccagggcggcaagctcgtgagtctgactgcctgtggctgttagcaaaagcgcaaggctgactctaggcccgtcagaccgccgccgtcgtcttctcggccatctcggtcttcgccatcttctcggcctcgctacagagtctcttccagattagccactatgtcgagtcgagtgcgcgcaatctcacacgacggcatccctctgcttacatctgctgacccagactttacctcaacagacgtcgctctccagcgaatcaacaagttcctgaccgagacgcccctgattgaccggtttgaggccgcgctcgtcccgggcgcaatcaacgatgacccgagctatatcggcttcaacaacgcctccttcacctggggcaaaaaggacgagaacgacccggccgcccgcagcttcactcttcaactcgacaatctccacttcaagccgggcaaggtcaacatcatcgccggcccaactggatcgggcaagacttcgctcctcatggctctccttggagagatgcactttgtcccgaagggccccggcgccaacttttctctgccccggaccggcggcgtctcgtacgcctcgcaacagtcgtggctccagaacaagacgctcaaggataacatcctcttcggcacggctttcgacgagagccggtacaggcaggtcgttcaccagtgtgcgctcgagcgcgacttcacgctcttcgacgccggcgacgagacggaggtcggaggtcagtgttgctctggctccattagtcttcttgtctcttctgctgaccggcttggtcgcttctcctctgacgtcctgcagagaagggcctcactctcagcggaggccagaaggcgcggatcacgctcgcccgcgccgtctactcgcacgccaaggtccttttgctcgacgacatcctcagcgcgctcgacgtccacacctccaagtggatcatcgagaagctcttcacatcctcgctcatccgcgaccggacaatcctgcttgtgactcatcacgtcggaatggcccagccgatcgccgactacctcgtctcgctcgacaacggccaggttaaagcgcagggcaccgtttccgaagctctccgggccgacccgaagctgttcatcgaagccaaggtcgatgagggcaaggaggagatggccgaggagattgacgcggtcgagggacccgtcgatgccaagccctctgccgagggcaagctcatcctcgccgaagagaaggccgagggccacctgtcgctctctgctctcaagctcctttgcaccagcctcggcggcccgatcttctgggtcacgatcctcatcgcttttgccgccgaccagggagccatcctcgtccagacctggtggcttggaaactggtcgcgccagtacgaggtggtcgccgacccaaagtcggtctcggtcgcttactacctcggcatctactgcctcacggtcctcgccggcaccgtcgccatgtgcatcggcttcacggtctggacgtttggcgccgtccgatccggcatgatcatccaccgcaaggtccgtctcggctgtctctttccttttcggagcccgtccaaagctgacccgtactctaccagctgctcgactcggtctttgcttcgacgctgcgttggctcgactcgaccccgcagggccgcatcatccagcgcttcaccaaggacatgcgcacaattgacggcgagttcaccgagctcgtgcgttccgtttcttcaagtctccgccctgtctcgagccaagctgacgtttcgcatctcgtgcgcgcagacctcggcagtgctcgagatgggcctctcgctcctgacgaagctcttcgccatcgccctcgtcgtcccgctcttctccctctcgggcctcctcgtcggcatcattggcggcttcatcgcagagctctgtcagtgctgccttgcgatcgtctgctctgctctgccatctgctgacacctcaacccccgccgccctttgctcgtccccagacatccacgcccagatgtcgatcaagcgcgagatgagcaacaccaaggccccgctcttctcgacctttggcgatgcgctcggcggtcttgtcagcgtccgggcgtatggcgccgagcagatgttccgcgacgaggctcagaagcgggtcgacaagtatctgcgcacggccgtctcgttctacaacctcaaccgctggtgtaacgtccgctgtgcgttttcccttccgacacgtacctgctagggtgtcaaattgcctaggctgttagaattcctcggctgatcatccttctttgcgccgtccagtcgactcgctcgctgccatcttctcatcgagccttgccgcctacctcgtctatgcgcccggcaaccgcgacgccgcgacggtgggattcacgctctctgtctcggtgcaattttcgtcgatgatcctgtggtgtgagtccactgacgtccggctgcgactcgactgcgcactgatgagagctcgctcctacttctctagtcgtccgggtgctcaacatgtgggaggtcagtcgacttatctctcgtccgcaacctcgcactggtactgacgcgctgtggaccacaggtgagcggcaactcggtcgagcgcctccaggagtatctggacgtcccgtcggaaaaggtcccgaccgagaccggcgtccctccggcttactggcctgcatcgggctcgatcgacatcaaggacctgactgcggtttgttcccttcgcctgcaatctgtcattcttgccccccggctgacgtcagcttctctcgcttgtagcgatactcgacggacggacctgtcgtccttgacaagctcacgctgtctattccctccggcaagcgcgtcggcgtcatcggccggaccggcagcggtgcgcgcactctgttctttccggcagctactcgtcgacctcgacgctgaccattagttgcacgtgcccgcccgtcgatgcaggcaagtcgacgctcgctctcgccctactccggctcatccctgtcgagggccaggttacgatcgacggcatggacaccgagaagctcaacctcgacgccatccggcgcgagattaccatcgtgcgtgccagctgccgacgcttcgggcatcggtcattgacgaaagtgtcgttcctccgccctccagattccccaggacccgaccctcttcgaaggcacactccgcaagaacctcgacccgtactctgagcacgccgactctgtccttctcgaagccctgacggcgactggccttgcgcacacctcggcctcgagctcgacgcccggcgacggcaccacgacgcccggcggccaccagctgacgctccagacggaaatcagcgccggcggcgaatcgcttagccagggtcagcgccagctcgtctcgctcgcgcgcggcctctgccggcggtccaagattgtcattctcgacgaggtgcgtccgctcttctttttcgaacaatttggcttgcggctaaccgcctttgtcgactgtgatcgcaggccacggcgagcgtcgactttgagaccgacagcctgatccagacatctatccggacctcgctccagggcgcaacgctcatcacgatcggtgcgtccgagctcgtctgccccctctctttgaccccacagtgctgactgacaccttgctcttcgaccgtctctgtgcagctcaccgcctgcgcagcatcatcgactacgacctcatcgtcgtcctcggcgcgggcaagctgctcgagatgggcacgccaaaggagctcattgagcgtggcgagggcggcgagctctggcgggcggtcgaggcgagctctgaccgggccgagctgcgcgagatggctggcgtcgtcgacgcttagtcggtcgacctcttcccctctcactttccctttctcggtctcggctagaaatgtgtcggcggatagaatgctccttccttgctgtctgtgagtgtcgtgcgggaggcccgacagcgatgcggagcttcgtcgccacggggccggtcgcaaggggcgagcgttggtcaaagccagaacgaggtacgagtacaaacaacatgcaagggcagcgggcgacgcgactatgaggacctattgcgcgcctccatcttggccagctcaacctggatcggatcgctcgagctgggcgctgccgagcctgaagatgctctcgacgacgacgccgacgaccgaggcggcggcgagacgggccttgagctgcttgctgctgctgcgccgggcgagcgccggtcagaccaggacgtgtagagctcggacggcgttggcgtcaggcatgcgccggctgcttggcgctcgtcgtggtatctgaccgcttcgggcgttcctgtaggagggaagaagagagagagagccgtcgtcagttgctggctcggagcggggtctgtcaagcaagactcacccggtgcgagcgtgtgtgcgaggaggccgagggcgctgcgaaggaagggcatgatgagagctggtagtgtgtgtgagcagaatgaggtggttgtgtgtgtcagaagaaagacgttccgtctgcacctccttttgaagacggctcccacctgacggacggcatacttctggccgccagctgttcggcgagtcggttcggcgagcgactcgccggccggccgccgtcgccgttggcttgcggcgttgcggcaacgcaagcccgaccggccgctccgaccgtcatcctgtggcgctctcttctttcttggagacggtcagagtgtgtcagcatgagcctgatagacggttgtccgtcgtgcccgtcgtcaacggaaggcgtggcggcaggcagaggcggcgaatctcgtggccgcgcgcgcaggcgtctcagcccggccagctggatgcacggcgagcaggagcaagacttgagctcaacgccttaagagaggtcgacctgctgaggtgccgctcggcaggccagggccaatcccgctatcacctgtccgacaactcatgaagcagttggcaggtgttgtgggccgacctcgtcggcatctcgcctgcagctgcagcttgctcgctcgcccacgcgccctctctccgtcgcgctggccacttcgttttgcagcccgacgacgacctttgaacctcttccgccacccccgttctccatcatggccagttccgctcctccttctgccgactcgtcgtcagtaccggcgccggccgtcggcggtctcgctcctgctgctgctgctgctccggcggccgcttcttccgcgccgccctccaaggcgccgtcgcctcggccgcctacgatcctccggccccagccgccgccgagcatcaacccgcacgcccaccacagccagtaccagcagccgggccagttctatccgccgccggtgaaaaacacaaaggagaacccggccatggcatttgccgcccaggccgactcgtacaaccggctgctccagggctggctcgactggtcgacgccctacccgctctaccgctgggcggcgaccggcggcctcctcttcctctttgcgctccgcgtcgtctacggcgagggctggtacattgtcgcctatggcctctcaatcttcctcctcaacatctttctcgccttcctccagccgcggtttgacccgtcgctcgaggccgaccaggcggccgacgacgtcgagggcggcggcgatgctggcactggcggtggatccggtctcggtggactcggcctcggcaagaagctcctccgggcggtcggcgtcgaaacagccggtcaggacaacggcatccttggcgagagcaacgaggacgaatttaagccgttcatccgccggctgcctggttcgttcctgccgccctcagatggacgcgtcgttgagcccgaccgcctgcgttctcgctcgtctgcattaggccttgggtagggttaggactgacaatctaccttctcgcactccggcacggcagagtttaagttctggctccaggcgacgcgcgcgaccctcttctcgctcttcctctcgctcactcgggcgagcgacatccccgtctactggccgatcctcctcatctactttatcacgtgcgtttcgtccttccaggttgctcttgcagcatccgcagactagcgcggtcgactgacgacaccctcgctccttgggctcggcagcctgtttggcctgacgatgcggcgtcagatcgcccacatggtcaagtacaagtgtacgtctctgcccatccgggtccgccccgctgtggcgcagtttactgacgaactgtcccgctcttgcagatatcccctttgacctcggccgcaaggccaagtacggctccaagaagtaggggcgattccctttaccacccggcgcactctcagcctgcctcgccaggccctgcatctacgcgagggcgtgtcacagctcagactacctctcaacccatagactggtctccctcccgggggcgtccttcgcacccctcgcagctccggaccctgcgctacacctcaccctcgcctcctttccttttctctctttctcgcggactttacagcacaatgaacgccttttccctggctcttccaccctcctcccggactttgggcagtcgtctactcagcagtcttgtgtctaggcgtcgtcgtcccgccagatctcggtcccgccatcggcaacgcccgcctcggcgcccatgacgcgcccgatccaggccgtcaaggccgtgacggccgcgccaaagacgtaggcgaggtcaaatagccggttgaaggccttgaacggcgggaggcttgcgagcagctgcggttcgggcccggcgggctcgaggggcgagtgctgcgggccggtcggcggggttgaggggagtgatgacggagggagcgagttgcgcagctggatcaggagcgacaggaggtagagtgcctgcaggatggcaacggggcgacgactcaacatcagacatcattctctgaaccggcgacagtagcactatggaagcaggtggaagcaggttgacgacgcgtaccatgagctggctgaggatgagcacgcctagctcgccgacgcccctccggccgccgccgaccctgctgaggatccggcggacccagccaaggacgtactcgaccgagctcgcgacgatcaggccggcaaggccgagcgagatgagccgcgaccagagggcaacgtcgagctcaaagggcaagtgcgagaggccgagcgcgagcaggtacgacagccaatcgccttgagtcccttcagccggcgccgactcgtccgttggcgaggttgcgagcgacgacgagggcgaaaggagcgatgggattgtaaggagcagccggaggacgcagtagatggcgaacatgtctgccggcacgagaggaagagaaacatcagtgggctgtagttcagcaggcagaagctgaagcaggtcttacagcccgcaaagttccacaggcggcctttgagcgttcgagagaaacgcatgcgctcgcgccgaaggaccatgccccgcaggttgcgcgacacttcgtcttgcatgagccgcaggcctcggagctcctgctcgagactgctgtcctctgtttgagaaggctggcggtcagtgatatgaagggcagattggcttggccgaggttcaggcgaaggacgaacctcctttgaccgacccgatcatccggccaaaccagcctccgctgcgctcgccgctcgaccccgccgcgccggtccggcggtccttctcgatctcacggtcagcgatgtccttcctgatcgagcggagggaacgctccgcgctgacgagatcgtctgacgtgacctcctcccttcaaatcgttcgaacggcatcagcggcgaggcgagcgagcatgaggagcgagcggcaacgcaccatgaagacgacgcgccgcgcgagtaaaaaagcagggccgtgttgatcgacccgacgccagagagggcaccgaggacgaggacgccaatgacgccgagccgggcgagcgacgaatcgagccagcctagagacgagaaggggagggagggggggggggggcatagatcgagaagcaggcgttagtactgccataagcgagaaccagactggaacaggatgaagactcgctcgacgtgccgccattcaacgagcgcatcggccttctcggccttgatcgccgagatggcgtcgtcggccttctcgtcgctgcggttgagcatgatgaccttgaaggattagggtgtagggttaaagttaggtcaggttaggtcggccgggtttagggtgtagggtcagaccttggcgccggccttggcgaaagcgcgcgagatctcgtagccactaggaggggagagggagggagtgagcgaggggagacgtcctcgtgcgatgggcatcgattcgcacgcacattccggtcgcgccgccggtgacgaaagccgtccggccgacgagcgagggcgggacgcagacctttgggccgatgagcggggcgaggacagactgcatggtgaagcttgggaagaggtagatgggtgttggtggcgaggacgaggacggaggacgacgaggggcgatgaccagcggatcgaaccggaatcgggcagccggcgtgctccgggcgtcgcgcctgctgcgcgtgcatgcaagacgagagtgttccactcatctcgccgggttcgagtcctctggaatttggactcgcagcgcgggcgcatgagccgaggcgcaggcctcccaggcccggctcgaccacacctccttcctttcctacagcttaactcaccgccagtctctcttcacgatggacgtctcggagcaccttcaggccatggccgctagcacgttcgtcccccgcctcgactcttgctgcgtgcctgcccgttgggttgcccgcacggccgccaaccggaacgctgacctcaactgaccgtctcctctcccatgcagctcgcgcacggaggacgacagcgagctcaacctcgacgctggtctcctgaccgtctttgacccaacgccgatcgacgaggaggagtacaagtgcgtgcggtttcggcggacgcaaggcggtcgtgtctggcacgcctccgaggagctgcgctgaccccccgctccttcgcctccggcaggctcgacaccgaggcctacctcacctcgcacgccctcccgcccctccaagcgctgctcaactccctcttctcgctccctacggctcgcacctcgtcgggcccactcgccacccttccaccgccgacgacgatgctgccccgtgagaagcccctcccgaagcccaagccgctcacaaagtgggagcggttcgccaacgccaagggtatcagccactcgaccaaggacaagaaggtctgggacgaggaccggcaggagtttgttgcgcgctggggtcgggacggactcaataagaaggttgaggagcagtggatcactgaggtcaaggtccggcctggtatgttcctcctgctccttccggcttgccttatccctccccagtctgacatccggcacccgcctgcccgaagatggtaccgaggtcgacccggccgtcacggccaaggaggcccgcaaggcgcgcgttgccaagaacctcaagcaacaggagggcaacgttaaggctgctgcgaagcgcgccggccctgcgccaacgacaaccgcggcgtacgccggcggccggcggggcgcagactcagttcctgtgccggtgtcgatctcggagggctcgggtccggctgagggacggaacaaggcggggcgcaaggcggagcttgagcggcgcgcgctgctgagcaaggtctcgaccggcagcatgggcaagtttgacaagaagctcgagggcgatgtcaaggtcaagggcgagaagcgcaaggtgcggatcctcccgttcagtaatcgagatgggcggccccagactgatccttttcgtcctccgcttcgccagttcacgccgaacgagaacatcaaagccgagcaggccaacacgatggacatcctctcgactgcgctcggcggcccgcagagctccaagcggctccgtaaggaggaggcggccgagggcgtcgtcaatgttcgcaaggcgatccgcttcgagggcaagcgcgaggccgcctcgggtggacggggtggagggcggggcggtcgcggtggccggggaggcgcccggggccgcggtcgcaagtagagagcgactggacgtctatacatgcgtcgagggctctcatgtagcacgctttaacccgtttggaagcgtataagtggacctgggacgaacttgccggcggctcggcacgccatctcgcgcttgggtgcgcctgcgggcggcttcgttccctcctggcttcagccgtcgtccctaccacatccaccgtcggctcctgacccccgtttacaccaacctctccagctcgtccaggatggcctctgcctcctcgccgacctcgccctcgatcgcggccattgcgacggcccctccgccgccgccgccgccggttcgctcgagccgggccgacctcgtgctcaacctgcttgcgggctccgccggaggtgctgcccaggtcgtcgtcggccagccgctgtacgtctgcgcacagcaagctgctgctgagaactcgacacgtcctgaggcctggctgctgacaaggtcttcatcgcgccctgcagggacacaatcaagacccgcgcgcagacggcgcccaagggccagtttactggcgcgctcgacgtcgcgaagcagacgctccagaaggaaggcatcctcggcttctacaagggtgcaaccttgagctcttcctcctccggctgaggccgtctgctgatatgctctctgattgctgctgctctcaggcatgctgtcacccttgcttggcatcgccgcggtcaagtccgtctcctccctctcctctgcccctttctcgtcgtcgtctccttgtcgctgacttgagctcggcccctctcgccccttctcttcagctcgctccttttcaccgcctacggtcaagcccgccgattcgtcaacccctttggcgagctctcgatccctcaagtcgcgctcgcaggcggcatcgccggaggcgccaacgccatcctggcgagcccggtcgaaatgttcaagatcaagatgcagggccagtacggcggggcgggtgacaagaagcttagcgcggtcgtcaggtcgacgtacaattcgtacggctttcggcagggcatcatgcgcggcttcaaggtgcgtcgcgtcggacaggccctccatccctcactgcctgctgacctgctcttcgccccttgcaggtcacattcatccgcgagatccccgcctatgccggcttctactttggctacgagtcctcaaagcgctacttccagaacaccgtctttgccggccagcagctgccggtctgggccattctgacgtcgggcggtacgggtgggatttgctactggctcgcgagctatccgctaggtgcgtcgctctgcggcttactgcatatcttgttgcctgtgatgtgcacgctgacgccttctgcgtgacggggagaaacagacctcgtcaagtcgaaggtgcagctgcaggcggctccgcccgcacccggctacataacccgcgaactccgagccatcgtgaccgagtctggcttgtacgtcctctccatctgttctttgctcccctttggtcttcgcgcacagtctgctgacggctcgcgcgccttttacccctgggcattggcggtcgcagtaagggtctcttccgcggcctgacgccctgcctgatccgggcggttcctgcagccgcatcaaccttcgtcgcctttgagtacacgcacaagttcctaatcgagaaggtcgggctctgaaacgttccttcggcgaggggatgtgcgtcagggcgagaatgccctctggcgcgagcaggaggggtcaggatgctgcaggcggcgatagagcctgcggtagggaggagttgacccgttgtatccatgctagaactgcaagggctttggccagcaaagggcaggtgacggaaggtgcactcttgccgacatacgaccggcttgtccctcgtccgcgcgcacgactccgctccgccgaaaacgccctggccgacgtcccaacgccaaccccgtcaactcacgcttccaccccgacatcgcccgtcatgccgctctcggcctatctcccgaagcccgtacaagacctttacgcccaattcccgctcgtcacgctcccgcgggcgttctcgccgcatcgcgcggagccgccagcgagcgccgagctttgggtgcgtccgccgtcgctgcctctccgacgcttcgagggtctccgacctccttcgtcacgccgctagatgtcgctcagcttggatcggaagtcatagaggtgcttaccttgtctccctcatgtctttgtctcacggcagatcgccccccggcccgcgagcagcagcagcgagtggtcgcccgacccgcgcagcctgcgcgtccagcttctcgtccgactcgctggcgcgccggacgtccgttggaaggactggcagagctcagcttcggctcctgatggtacgtactcttcggtatcccggtatgcttgctacgggccttggaggatgcaccgaggagggctgacccccctcgccctaccccttctcccatccccaataggcaccttgcctgcgctcttcgtccctgacaagggcttgatcgctgccgacggtattcgagcttggatcgacgaggcgcatgcgttttatccggcggacgacccgtgcgtgacagcgtccgctgctcgatggacttcgccgagttgacatccagcctgcgccctccgtgcgctcgtccatccctcccaggcatcacggctacccatcagcttcgcttgcgctggaagcgcgctccttcggccgtctcgtcgagtcatccatctaccccgccttcctcgcctcctcccccttcttctcctcgtctaaccaggccgagctcgccgtgctcctctcgagcccgccaccgtggtgggccggcttggccgcgccgctgccgatgatcgctgctttcggagagggcaggaggcgttttgacacggatgcgcttgcgcgggagggcgcgagggcgatcaaggcgctcgcagcccggctgaagaccgaggacggggggaaggacggctggttcctcggctgcccgtacgttctcgcactggcatccgccctggcattccaactttgcgctgaccttattccccttctcttgcgacagcgaaccgaccccgctcgactgcctgatcgtcgcccacctgtctgcgatctgggccaccctccctccggcgagcccgctccgccgcgcactcgaggtcgagccgggcctgcgggcctacatggaccggctgctggcgaagctcagcgcaccggcgccgacggccaagacggagcgatagagatgcgccgctagatagattcggctgaaggcttcgtcagcgcgctgttgagcggcctcgttccgtctggtcatgttacaacggaggggggggatacggcgcagatggtctgctcatgccgtttcggtgagaccgactctcgtgccggtcccccagcctggacaccctccgtgaggtccgctctcagaaaccaaagtgtaccagccgccagcccaatcagcccaggagctgagcttcgacggcctgcgttgtcagatcgctttcgtcgcggatctcgatgacctgagcgatgatgggtgcgcaggcagtcaagcgaggtcagcagctcctcgtcatcgtggaagccagcaagcgacgcgtgacgcacccgtgctacgtcggccgcccgctggaatagtgataggcccgaagcatgcagcgtcttcatctcgggcgccccggttccaggattatagttgagtgcgaagagcgggcggctgacacggccgtccttggggtcggtgagctcgtagctgacgacgatgtaccggggcgagttggacgggagctcgtcggcgaggtcctcaagcgtgtcgaacgacgggacggccgagtcctcgacgaccgtcaacgtcttcttgtcgcacttgactggaggagggggtggtgagtatgctctcgcatgtcagtgagggggggacggcagccgaggcgacggcatcaagggagagccgcacagataagggcgctgttatccttggactttgagaagcggaacgccttcaggctgtcgtagacgtctttggggatgtcgagcgtgctctgcgagcgatggcaggggaggtcagctcggagggagaaggaggaggcggaggacgccaatgaaggcgaggtgttggacgcacggccatcttgacgggtttttgacttgcacccagcggagagagggtgcgaacggagagacagtgatgatctagagtgtcgggagaaggtaatggagggcttcgaggaggagtagatggtggtggtagggggcaacctcgaccgcagcgccgctccgaccaagagcatctcgccgagcgcggtcgtcgacagttgctgatcctcttctggcctctaccgtctttgcaattgacggagtgttcagaggcaatctggacggccgtggagaaggtctgattgcatgtcatcaacgtcctttctctcctccctgtcgctccgccgcatcttgccgtctcccggagtctcttgaactcgtctctatccgtgttcttcgcaacccccctcccccggtctgaggggggttcgagacaaggcactacgctcctctcaccgtcgccacaagcatctcctgctcgaggacggttagaagctcatggagctgagggaggaaacaaaggggggagggtcagcacgggaagcggcaaagagcgttctggggcggggacggcgcacctcatgtccgagcggatacgcatgctgagagaggggcagactaagggtcagcagtcacccaggtcagtacagcaagagcaagggcgacgcactagtcgaacaggccctcggtccggcccatggcggcgatcgcaatgtcctggtcccagagcttctcgttggcgacgcggcggatatcgtcgacggtgacggcgtcgatggcctcctcgacctgcttgggcgtgagccgggtgccgtacgtgaagatgttgcgggcaatgtcctcgacaatcgacttggtgccgtcgtccgagagcgagaggagcgtggccgccttgagctgcgacttggcccgctccgtctcggcctcggtcggcgaggtcgacatgcgctgccactcctttagggtccagtggacagtctcgtcgaggttggtgagctgccaagggaaaagaaaacggggaccagggtcagcgggctgcaggcgaaggtacggcaaggcaggagcggcgatgacgcacgttctccgagacgaggtggacaccccagaggccggtgtcggcgtacgagaggttgaagtggcggaacgagttggcgtagttgccggccgacatgatgtgcgtcagcttggacgacagcagcggcgcggcacccagggaccggtcccagttgcccatgatcgaggccaggacgttcatcgcccagtagtcggggtgcttgttcgagacgccctcgacggcgatcgcaatgtggcagtcctcccaggtgtcgtcacggatgcggacctcggagccgacgaacgtcgccttctgccggggcttgccaccgaagggctggcccgacgtcgggaacttggcaaagtgcttctgggcgagctcgacgagctggtcgtggtcgatggcgcccgcgccggcgaagaccatcttgtcggcgtgcaggttctgggcccggtactggaggaggtcctcacggttgatcgtctcgatgttctggttcgagccgaggatgtcgaagccgaggggctgacctgtagcgtgggactggcgggtcagcggtcggcctcccagcatagcatccgcgcatggactgaccctggaaggcgacggcgtggagctggtcgaagatggcctcctgcttgtccttgccgacctcctcggcctcgcggaggatcgtcgaccgctcagcctcgatcgccgccggctcaaacttggggttcgagagcatgtcgccaataatctcggtcatcttggggacgccgtcggcgagcgaccggccggtgtacgaggtgatctcgcgcgcggtgtaggcatcgagccggccgccaatgttctcgacctcggtctcaagctgcttgagcgagcgcgaaggggtgcctggacaggaggatgcgagatggagagaagctcgtcagtgatctgagcggaacgcacggaggagggcgagctgcaggaggcgaagacgcacccttaaagtactgtcgttgggccaatcaggagggcggggatgagagatcaagcgctcggaggatcgaggcagacgggcacagaagggacgaacgaggtgctcggcaaagtgggcgacaccagctttgtggtcgtggcgcgagccgacgtcaaagtagacgccgacggtcgccgtctgggcgtgcggctggtactcctagagtaaggtcgacccccggggcagagcagagagccagcccgtcatccgcgcaagagagacgccacacgccatccgttccgacccagcagagagacgccgggcagaccacacaccacacagagcacaaggagggacgtcgattgaatgaaggaggacgtcagcggccggcttctgggtgaaagacgctcgagccgagcagcagccgaggagagcgcggacgaaccgaggcgacgacgaggccggtcgggagcgtcgagatcttcgtgacgggctggaccggcgccgacggcacggccgtggcgaggcagcggagaccggcctgaagtcgagaaagacgcgcatcgcaaaggaagagaggaaggctggtcagctcgatggtcctgcttgtctgagcagccgggacgcgggcgggcgggcgaagaaaagcgccaggcgagggtccgatcctcctcgccggcgaggatcgaccggccggtcggctcgcggcgaagagcaacagggacgcacggctcgtgcgggggccttgagctggcgggcgagcatccgggaggccatgctgagtatgagaagaaggaggaagtaaggggagagggtggggtcggaggttggcggtcgaagcagggcggccgccacaggcaagcaaggcgagcgagccccgccagccaatcagcatcggcgagccggccagagcgacctctcgacctctcgacaggatgcaccgtcggactttcatgacggctgcagtggcttctctctcgcagcagggctctttgttggcatgtgctgaggtaggtgtggcgtcgttgaaggctttacaagtgtggcggtgctcgcctccggtcaaggtccacgctctcttcaaggggctgaccctcgacaggccgacgcttcattcgcatcccctcgagcgcaggcaagacgggagtcagtattctacaacggagatctgatcgcagtacggagggaagagttgttcgaggtggctgagcaaagacgtctacttccagatgtcggcctgagaaggacggaggccgagtgcgcatcagtcgtcccgaccgccaatcactcgtctgacagcgaacgagcactcacaaacgcatccgagctcatcatgttgcccgactgctgagcggaggcggccggcgttgcccaggcgtttgtcaatgcgggctggccgtcccagagctgaaagcgcatggaacgaagggtgtcagcgcaaagctctgatagagcggtagagatttacataggaaagaggcgactgaccgagttcgagggggcggagggcggattcgttgcgttcggtgcgggcgtcgaccagagctgagatgcgaaggaaagtaatcagcgagagccagagctcagcatcaggagaggaagccgtagagagcctcacgttgttcgaagctggaggagcagcgacaggcactgacgagccccagaggtcgcctccgctgccgccaaattccgacgtagacggtgctgccggggccggggccggcgcgccccatcctccacctcctccaccaccgaggctcatgccgccgaacgcgttcgacggcggtgcggcactgctgctgctgttgccccagatgtcgttcgagccgccggcggcagcgacgccccctgctggaggctgcgcctgggccggcagcggggccgagaagagcgacatgatgtcggtcttgttgttacccctctgcgcggcggcgccgttcgccgctccggctgaaggcggcggggcgtgaaagtcgaggtcgaacagcgacgacgagggtgcaggaggggccggggcgggcgcagcgggcgcagtgggaggcgggcgtaggcagagtgggtttgaccgttatcagaggggattgtgtggtgagggacgggatgggtttcgagagcggccgggtgcagtccatgagggcatgatgtgtgggggcgtctcgtgccgggggagggcgggatatcgactggacaggatcaggacgcgaaaggattgtttgctttataaaggggatgagggcgtttgaggacgcgcgtatgggcagatgcaggggcagactggagaagaggagacccttacagactcttaaagaagccggtcggacgagccgcaaacggccgagcgcgatcctatggcgagcggctcggccacgaagtgcccctgaagtggggggagcgaccgatagccttcgaatgggtcttccatctggacgtcattgtcgtcctcgagggcgatggggtcggtcgacaaacccccgaggccgaacaggccaagcagtgaagtctcctcgccgagcctctcacgctcgtccgtctgctcctcggccccgagcgtcgaccgatccatcgactccgacacgttgatattgagcttgcgcatcggctcgggcatcttgtccgcgagcgggccgaaagcggcgagctcagcgaggaacgaataggtcggcgaacagggagccgaggcgaagggcgcaatggtgtagggcgggcttgggtaagggtaggatggaacaagggtcgccgaaggcgaggtggggaaagtcggcgagctggcgtacgtcggcgagaagtaggacgtgtggggcgagtgcgaagcgtaggagacgggcgaggtcgcgctcgagcttacaacaagaggcgctcttgtcagtcaccaaaagcgggccgggggaaggaggcgacgagtcggaaacgtacgtccggaggcgccaggccgcttgaggctcgagcgcctcgccctcgccggcgctctcgatgctctcgccttcgtcctctgcctctgtcgtcgggcggtgcggcccaccaggctggagcaaggccgacggcagggcgacgaacggcccaggcgccgacgacttgcgcttgtgtgacttgccgactgcggcggtcgacttgaccgatctcgagccagcatctttgataatgctcggtgcgccctgtctggtgctcgccgaccccgtcggtccagtcgagtgcctccggtttggcccgccgtcctgcgcaacttcaccgccgccaccgccgccgccgctgccgccgagcttgccgttctcctcgctcgcgacgcgcacgccgatccgccgccgctggacctggccgtgctcgggcggcgcacgcgtgtagttcttcttgttgcgggcgaggtacgagcacggggcgcctttggcgaggcagcgcgagcagtgctcgagcccgtcgcactgagcacgtcagccgcggaccgccaggatgcgtcagtccgagtacgcggcttgggaaaggagagaggacgaacgtaccttctgcttggtcgcccggcactgatcacatgcccgctggacggcgtctcgcttagaaacggacgaggggtcgtagaccgggacaagcatctctgcgtgactactcatcattggcgccgacgacgagagcgggcggcgtaagagtacaaggaaaggcctttcgaaggagatggtcgagagactgacggtcagcgtcaagagagagggacggaacgcttcacgcgcagcgcctgccctctccctccgaagcagacgcgtcgaggacgcacctcgacgtgggagagtttggaggcaggacaagagcacgggtgagacgagaccagtccagtgacaagcgacgactgggtgtcagcgtcgagggagggcgagtggccgtcgagtgctcgaaggcagctcgtccaagtcggccgaacgaaatctactgcgggctggcgttcgaccacgacgacgacgcatcctcccaccgaccctcctcgacttccttgctgcaacgccgctctcctgaacgatcctacttgctgccgaaaccacagacccgaacaagtggccctcagccctatgtctgccgcctccgccgccgccgcctcgagctccaagctctacctgcccggccagccaatcgccggcctcgcaccgcccttgccctcgacagggtgcgccgcacgcttagaaattacgctgctcgcaggccacgtctgtcgcacaactgatgctcgtgtccactcgctcgacgcagagctggcacttatagccgtggaggagcgatcgtctcaagcctcgtcggccgggtcgagcgggacggctcggtgcgtccagaccaagctgccgaagctcggcctgctcgcagacaacgcttcaagcagcttcagtctgaccatgctcgttgccttccgcaggttgtctcggtcaagtcgcaccacccgacgtcgtacatcccgcagccggcctcggtagttcgtcctgcctgccccagccctcgccccaactgttccgctcgctgaccgctgaacgcccgaacgtcgcaaggtcatcggcaccatcacgcgtctgacgccgcagcaggcgaccgtcagcatcaccgtcgtcgacggccagccgacgggcgaagagttccagggcgtcgtccgcgtgcaggacatccggtgcgcttcgtccctcaatcgcgtgttgcgtgccgcccgctgatgaactgatgacgctttcgctcacctggggtcaatgcaggttgacagagaaggacaagatcaagatcatcgagtcgttccgactaggcgacgtcgtcaaggcgcttgtggtgcgtcctcccttcaccgtccgcgccagcccgcctcgttcggccctgagctgaccggctccggtcatcttgcccctcatggcagatttcgctgggcgacgcgcgctcctactacctctcgacggcccggaacgacctcggcgtcatctttgccaattcggaggccggcgcgccactccggcctgtctcgtggcagggtgcgtgcgcgggtcgagctcgctgctcgtagatccagggctgatcttgtcctctccatctctgcagagatggcctgctcggtgactggaaagcgcgagaagcgcaaggtgcgtccctttagctggagtagcggcctcggcctcctccttgcgtctgccctgacgtcctgctcacgtttgccgccctcctcgctttcaggtcgccaagccggacggaatatgatgagcctagtcaagctccgcgcaggtcggtcgagctctgtctccctggctgtcggccggtctcgtcgaggcatacatcagtcgccacgctgctgcacaccgaccttgcccgaccagccctgcggcttccactcctcgccgccaagccgcttcggcagcccctcggccgtcttgccttgcctctccgcgcgcgagctgccagagttgacgacctgctcgcggagggcacgctgcgaggcggcgcgcagcgggtcggtcggcggcgtcggctcgagatcgggtcgcgagggcgtctgcgcgggtgctggtggcgctggagaccgagcttgccggctgctcgctgctgctgctggaggctggctgatcgtctgctgtgtagaggaagaggaggaggcggaagcggccatccgttgctgggcggggacctgccgctcggcatcgagctttgccatctgccgcacgcgctcctcggcgtcctttgcctcaatcagcgcgacacgctcagcgaggatcgttctccggctcctgtctgcctcaagctcctggtgtgtaagtataaggaggacgtcagcgtgccgtcgggggaggaggtcttcggctgggggtgcctgacttcgagtgtcggcgctgcggcccgtgtgaaggccagccaggacgcccattgcactggacgagtgagagagctctcgtcagtctctctacttgcagtcagggctcgctacccggccgactacgctcgcacctggaatcttgccagcccgagcggtgatgtcgctcgcatgccgctcaacattctcgtactccatcacccgccgcggccggaccgcccccggctgctctggcggcgactcgaagtagcggttgccttcgaggtcgcggccgacgagatacttgtcctgtccgccaaaacaagggaaacgcaagagcgcagggccacggtcagctcgacgacagagagaggccgggcgcttgttgacaggctcggccaaacgagcgcgagccgatgaaggcggcagccgaggaaggacggaccttgcgcttaacgaagcgcgccagacggtccaagagaccagggacaggaagagtaggccgcatcctagaagatgaagaggaaaaggaagaggaggaggaggaggttgtcgttgggtggacaggactcgacgacgacttgatcaggcggaggtagcgctcacaacctccggacggtcatctcccagcagggcggcgggacgtatggtctgtcgtcctgcctctcagaaggcaccctgctcgagcaggctctctctggtatcgtgcagagcgtttacatccttcagcgctgacgagactcgccagaggcgggctgggtcgctcaccctcctccgaccgcatcccccctctcgccctcccttagacctgacctcgacctcgacgacacctctctccccaactctcacagagatgcctcccaagcgccttcttctcacttcctcgccctcgtcctctccgccgccgaccaagcgccggctctcctcaacggcggcggcggcagcagcggccgtggtcgtccatggctgcgcgtacctctggacgacggacccggccgggcgcaagaccagtccgttctggttgcctctcagcctgacacttgatcactgaccgctcccgtcggtcgtccttccgcagagctctgggtgacgcccggccgcaacctcctcgtcggccgtaacgcctcgctctggtcgggcgctcccttgtcaacgcaagagttcgccgcacctgacgctgacgaccttcattgcttcgagcagtcactacgtcgtctgctcgcccgtcatctcggcgactcacatgcggctctttgcgtgcgtctctcgtctacgtctctgatggtcgatcgcggtctgctaaccagggagggtcgggtgtatgcgcgcgtacaggaccaagacggatgaggaccggacgctcgtctgcatcgaggtaccgtaacgcttttatgccctgcgagtagttcgctctctgacggatctagctctaccgcaggacctgtcgaggaacggcctcaagatcaacgacctcctgctcaagaccaagagcgcgatcctcctgccaggggacgtcatctcgctccgaggcgtcgcccagggtcagacccgagctcactgaaaggtctcgagggagaactgacgctgtctgctgttccaagtagactttacactctgcctccccgctctcgacagcccatcgtcgtcctcttcgcgctcgtcgcccgaccccgcttcagctctcgcatcgcgcgtctcgttttcgctctcgctcggctcgcctcggccgccgttccctccatcagcggcgccaattctaccgccgacggtcaagttcggccagtatgtcgtgcgggaggacgtcgtgctcggggcaggcagctttggcgtcgtccggctcggctgggacgccgaaggccggcaggtcgcctgcaagagcgtcatcaaagcccgggtgcgacgactctcccatattggctcccttgagctccaatttgctgacctcaaatgagctcatctcttgttctgcgaccgcagctccagacggcggaagacgtccgtcggctccgtaatgagatcgtcctcggcacgcgggcaaaccacccgaacctcaaccgtattttcggcgcaatcgatgaggccgagtgcgagagtgacgatggaagcggtagaggcggcttctaccacctgttcctccagctgtgagttcttgtgtccgcatggccggcccttccaaagctgactgtcgccgccgtcactcagcgttaccggcggagacctgttcacctacatcgagtcgtttacgctccgtggccggcgcatgggcgaggtgcgttctcttgcccaaacatccgcttgcaagatctctgcaacggtaggttgatgttcagtgcaaaccgggcgacagggcgagtgcaagtacctaacgtttcagatccttcagggcgtcaaggtcggtgtctctccctggtgttaggcgtcggcttagctaatggtctggcgcgctggcaagtagtacctgcatgagctcggcgtcgcgcaccgaggtctgtctctttcgcctgtgcctccgagccatcagccctctgacggtggcttcgttttgaccatccatcggcgcagacctcaaggtacgtcgcaagggcttccgagcctcgacgcattggagcttgatcagcatcatccgcctgccagcccgagaacgtcctcctcaagcacggtggctccttcccgacgctcctcatttgcgattttggcctcgcgacgcccttccgctcgtcctcactgccatcgactaagaagagcggctcaggtcgctcgtcaagtcatgccgcgcccgctatccgagcgccgtcgatccttggtacgccgctctacttcccgccagagtacattgtcgcgaagcacgagcaggagctcgcgggctcgcgtaggcggaagcagcaacagcaccagaagcagaagcgcggtccggcaggcaagaatcatcagcaacagcagctagccgccgctgtcgaccagctcgacgcgaccgcccttgacgtttgggctatcggcgttattacgtggatcatgacaaccggcacgcacccgtttggcaacgacgatggcccgcggccctcacttgacgctcctgtcaccgccgcctccctcgctaccgacgccggcagcttctcgagcagtcccgagatcaacacgctcgaggcggcgatccagcgccgctcatttgaccggcgcgtcatcgctggcgacgtgcgtcccagtccccgctcactctctttactgtcgtcggcgcctactcacccccgcgacctctctgcagcactaccccaacccagctctcgcctcatatgacccctctgccgcctccttcctcgccgctctcctccatccgacgcccgaggaccgggtgagcgtcgccgaggcgctcgcgctcgagtggatggcgctggagccggagcgggcgctgatcgagcgggcgtgggagatccgggtcgaccaggacgggcagagttggccgcggtaggagctttgcactgcctcactgtatcgatatgcgcctcctcttcttcccgacagggtgtccgagagaactagcgagttcaatgtacatgaaactggatcgagcttgggcgattcatctgggcctctgccggcgcccgcccgccgcgcgccgggccgaagccgcgcgcgcgcgggcgcgaggcccaatccgacctcgcccagagctcagagttcgtcctccgaccagcctcaccaccgtcgttgtccgtcgtctcgtctcgttcctgcccagcatggccctcccccgcaagctcttgcttcacaagaacccgtatctctggctggtacgtcgcccgctccctgccgttcggagctcgggtactctggcgagcgtcacgaccgagcgcccgcccggcagcctcccttcaaccctccgaacgagagctcgtcgctgaccatctccgacccccgcccaatcccgcagcaacacaagttccacgagtacccctcctacgcctggtcgctcaccatcttctttacgaccccggtctggttcatcgctcaggaccagatgaagcggcactactgggactttcaccagccggcaccgctgcccgtcacgttcgagagtgcgtcccttcgtgccttctgagctcggctgggtctcatttcgtttcgatcagctcgacatgggggtgagctgacgtattgattctgccgcaccctacctgcctacagccccggatcggcctcggcgaccggtgccgtccaagtacgacgactgagcgcccggcctcgcccgccttttgggccagcccacagacgtacagcctccctagcaggcgggcggaagaatgcggctcttggagcgctcccttctttcctcttagcttgcgggtctgcgcggtgtagatccctttcctttcttccctccgctcttcatgaaccgtctctttgttcgaggtcgccctgcgactactgacctcgcagacggaccgaccgaccgacttcccgaggactgcccaagctgacgtcgaagcgggtgatgggtggttcgaagagggcgatgcccgaggtgcctggccgaggtcggaaggcgagcgacggaaagggtcgcacgcccgtcatcgctccgcttcgagagagctttagaggtctagcattgctgcagacagcacagtcctcactccagtgacattgttggccttgcatctggcgagacgagccttgcatctagcgagacgaggatgcatggcggcgctgcgacgcaagcggtcgaaggagcgcgggaacgccggctgcgcccgtccctccgaccatcaccctgcctcgatcctcaacctgcctttattgaggcccagcatgctcccgtcgctcctcctcgccctcgcacctgcggccgcccttttcgcgtctgcctctgccgacgcagtagcgtcgccctcgccgtcggccatctcaattgttcaccgctacctcccgccctccgcgaccgccggcgcacccctaccagcctggacgccccggctcgcgatcctcctcgacggcccgtctgccgtcggccggccagcgaccgtcagcaaggttgaggatctgcttgcggaccaggaggtcgccgacggcgccggcgagggctggtaccagatcgcgcttgaaggcggcgagtcgttcacgtcggttcgggcggtgcgttcccttcctcacttcttaagctctccggcgttgcatcatccagcaggcgccttgtctgccggatctgctttgttctcagctgctactgatgaacctgctcttctcggcccgcgccgccttcagtgcctgctgaacctgccagctgccgcgaagcaggaggtctttacgcttcatcccaccccgaacgagccgggcgtcatctaccacgtcgactatgccctggccggcatcgcccgtgacggcgcgtgtcctctagcctctgtcgccggcaagcagcgtgccaaaggcggcgagattgtcgtccagctggccgcctccgagagcccgaccccgtacgtgttcccccgccggggctttcggaccgccgacgaaacgcgcgtccgcgttcaaaagccagcggcccaattttcggcccgctcgcgtcctgaccgccatcccttctctttctccgtttcccatgtaggcttattctcggcgccccgccgccggtcgacgcggcgacgggcatgccggccgagcccgtccctgaaaagtcgtttatccagaagtactggatctacttcgcgctcccgatcggcttgctgctgagtgcgtcgagctgcttcgagcccgtcaccccttccgcctcgtccctacgctgaccaccttcctcgctgcctctcttgcagtgcttcccgaggaggccccggcggctcctgtggcgaagtaggacgctctctttgatgactgcaacgacctctcagctcgcctcgccctccagtccttggtcgactgacctcgtgagtgcctgctctctacccttctcttttccttctttcctttcctcgcggcagtccgatccgacgccctttctctccctcacggaaagggcgccggagaccttcgccgggcccgaaaagtggccggtgggggcatggggcggctagaccaaagcgtttacgtttgagggagctcgcccggtcacacggcgggcttccataaagatttacctacagcctcctcctttatccttcccttacctcatgcgtcttggccgggttgctgactctgtctcttgcgtcctctcagatcttgctgaccgtttgctgaccgaaacgtcttctcgcctcgaccacggccccctctgcttcaactggttagtccctccgcttcctcctcgaactcacccccccccttcctccacgcgatgaataatatattcacactgtccgatgcttcgagcatgaagacaaaccttctattgttatatgagcgtccatcctccgacccccttccttcttttttccctttccgctcctgcccgctgcccttctcttcgtcctgctctgcgcccgcgcttctcgtactgaccttctgctcctacctttcgtcgactagatgcgcgccccgcactgctttgccctgtccaggctctagccgagatgtcgccccggccttcagtaggtcagttccctcctgtttctcgtcgtttgcctcctcttccccccccctttctcccatcgcgacgatcgacaaacacattatctaaaacacagccacgacgccggtgcggcttcataacccgcccggtcaagaggaaccttacaacggtaactgagcgttccccaatctcgagcccgactcgcctttccgaactgtcaccttgccccgcctccgtctgcctttcagagtgttgagactgacgcgctttgcctgcctcatctcgcagtccacttgcagcccgacagtgcgcgagcgtatttccggcagcacattgagtggaacgtgagtgtcgttccttctcccttcttcctctttccatccccctccctcgcgatgatcgacaaatactttttatctaaaacaacaaccacgaccgggctcgcggcttcataacccgcgggcctgaagaggaactttacaacggtaactgagcgtcaccctcctgcctaccccgtctgcttccgcgccctgccgtcgtctgcctcggtggctgacatctcgtgcactcttttatcaaagacgacttgcgacgccgccttctctgctgcttgcgttgactgcgggccccgctgtctatacgatgacgccctgccttgaaattctcactcagtctacttgagatctcccgtcagcgccctctccatctcaatgctccgctgcacgccgttcaagtctgagaaaagaccagtctgtcgtggtccggcaaacgccttggtcatgcatagttgagcggcccgcaagggagcggggtagagaggatgagattggacgctgcttgcgcgtgcccttttgcgtaccgcgaatgcaccgagagggcctgcccctcgttcgcgggtcggcgtcgttcatcaagcgctcggcctactggcgcgcttgcctgttgctgctggcccgccggcggacctggcggaggagggtcgacttagggttggcagaccaggtcggtgctgggaagggcgagttcgggagaaagaggcgtcaggagctgcgccttcgagaatcgagaagtggcagcggccatcaagaacgcaccggaagcaacgcagcggccctggatgcactgcatgacgtcgtcgccgctctcgagcgtcgtgcagtcgacggccgcctcgtcacccgggcagcctccgcagctctcgaggctcgtcagcgtgtcgaggcagagcgcgccgcactgcttccagccccgaccgcgcgcagagcaggcgtcgctccgccggcgcgagacggtggcggctcggtcgaccgtcgagccggccgaaggtgttgggccctcgaccgggggcgtcgctccagcgacacaggcactgagctgagaggtgacgtagaagatgcctgcaagaggagaaggatatcgtcagcactggcgcctcagaatcagggtcaaggacgccgactgaccctggcgattgtcggtgtggaccgagccgtcggcgcgaatgacgcgcgtggcaaagttgccgatgttggaggcggcgaggtcgggcacaaagacgccgtagtactgcgagaggaggcactctggtcaggctcgaggacgaggccaacgggtgggctggctggagggaagacggacgataaagggcgtgccatcacgcgcacggcgatacaaagccttgatcggcgtgccgtaagtcgtcttggttgagtcctgggggagaaggaggggggggggggcgagagcgagacgtcagcgccctctggcgtacagtgcaaggctaagcgcgcgcgaacgtaccgaagcgaggtcgtagtagatctcgaccttgtcggcagcgttgtacggcccgaggacctggatcgttacgttgaggccgacagtgcccgtcggcgacgtgtagaggcacgtgaaggcctctccagtgtccttcatcgtcagatgagatgaggagcgtcagcggccagtcaatcggatcggaattcgaggtgagacgtacgatcatgactgggatcaaggtcggtgcgggcagtcatcagcttcaggtctgcgtcgagaagggtgaaaagagcaatgactgactcgagtcgtcaatggcctcggtctcggtaccctcggggctcgaatatagtgagccgtcgctgagccgcaaggcgacctttatggccgagatgctgagcgtcgggcgaggaagaaggggtcagcgccagtctgcctggcattgaatggatcgaccgctgctcacccagtcgtggggtcgactccaggcgagcgagtagagaagtcgcggatcgtaatgggcgcgccattgctgagcgtccggaggttgcgagggaaaatgaggtcggggttcgtgccgactgtggtgccaaccgagccgtcgcggttgagatagacaatgtcaaacgactggaagggcatgttgaagacacgcgcgctcgccgtctggaggtggtaggcgcccgaccggaggcttgtcctgaagccgacggtgaccggccagggctgaagcggggccgtgagcgactggccgccggggatggctgctcgagaggaaggggagcgaaggtcagcgtttagctcgaagcggccactgcaggttcgaacagggctgaccgtcgttgagcatgcgcgagaagacggtgttgcagtcggtgaagaaggcgtcctgcgaggccgcgtagcggttgagagtgacgttgccgtcgctcgagaataggcgcgaatcggagctcgtcgcgagattgttgctgttgacgggctggccaagcgggttgacagtcgagccgttgacgtactctttggcgacgaggttgtcaaagttggtccgggtcgagtcgaagccagcgtggttggccgaggtgatctgagggctgttgacccggtggacgccgccgattgtgtggccgcaaacgacgaggctgatcatttcgtcacggctgaagcccatgcgggcaaactgctgggtgtgcgtcgtcgtcgactgctccggcagaggcaggaagccctctacgacgggagatttggcatcaatacgaccggcacggaagggaatgactggtccgccgcaggcctgcgtcgaaggaagacaggccgagatatcagcactttgttcggctgcacatggaggtggaagaaagacgcacgccgacggcggtaatcgcgccaagggcgatcaggtcggcgagggtcacgccctcttgctgcgaaggaagcgaagggtcagcaatgtgactcgggtgtgtcagtttcgctcctcttctcacctgaaagagcctgaattgggcaagggtggcgggtacgaaggcgccggtattctccgagctgcaagaaggagaggcagacggggctgtcagcttttcattctcgtcagatcaagggcgaagagcgagagacgtacaagcccatttcgaaggcaattgacccgtcaaggccgccagtgccgctcgcggcgtcgtgcgagccggcgtcgtggaaggcctggttgagcaagggttcgcgtcggtcaacgttggcttcgcgtcgcgtcgtgtcgacaagaaacaggacgcactgtcctcagccactcggccgctgtgttgcgcgacgagccgccggtcgcacagggcgagacgaggccgacaaagcgcgagtcgctcatgatagtccgaagggcgcggatgttgggctcggcagcgccgacgagcggagtcgcgagcgcggccgcgagggagacggcggcggtgaggagaagcatgctcgagcggaaaaagcggagctaagaggcgagctcgggcggcgtgacgatcggaaggggaggagggtgtcgggaaaaagggaaggcagagtggccgttgcgaggaagcgaggagggaccgacggctggaaaagctggccgaccgaccggctggtcaccctcgggccgagaagctcgtcgcgtccaggccggacggtgaaggggagacgagacgctcgacctcggccgggcctgtgagaagcccatcagatacaggccttggcggtcagcccgcgccaaacaaacagctcgaaaaagacctgcgagaggcaatcagatggactgaaggggcgatcgagggatggggtaagcgcccgcgcgcgcgtgcaacccgatcgacccgcccgcccgcaaaagtcgtcctcccagaggtcaacaagaggttcagccaagggacggccgaggtagagtggcgtgcagatggagggcatcgcaggagtccagggaggcggttgacgagcagggcctgccgctgctcgctgtgcctgggacaaccgcaagcgaacggcgtcgagcagcgagctgcagcccctcgggagcaagcaagccgaccgctcagcccgccagctcgggcatttggctcggggaggcgtccggggtcgaccaagtgaatgactgcgggcctgcggcgaaggcgcgtccttgcgcgtgcaagctcgaccggcgaccgacggccgaggggtccgcctgttgccattagcgctgaggcgaggcgagctcgggctgaccggttagctcctgcccggctactgtcctcggccatgactcgttcgaacggcccgccagcctggagagttaccggctactgtcctcggccatgaatcgttcgaggctgccgcgccacacgctccgctgatcggctcggagtcgtcgtcgtcaggtcgcgcaccggcccgagaggtagctcagctgtagaggtgggcctacgccagcgtcatctccgctcgaagggcggtttgtgagaggcccagcgagcgaagattgcgagtcggtcgaggccaggcaagtggctacgtgggagcctgggcgactgagatggggcgagacgggcgatgaagagagatgagggagcggtcgatgccccgtcagccgctcagttgctggccagtcaggacggatgatccctctacgttacgctcactggccgaggatgctgcagtgagacgtacagggctgagaaggcgtcggccttgccctttcggtccgcgaggtttgaaggttgtcgagacgaggtcggccggtacggtcaacggccccatactcccgcttagaataggtgtgtaaaggagcgcgctcacaagacgccagcgtacacctgcagtttcagagcgggccaggaggttgaattccagttgtcagggcgtcgttcaggtcgaagacaggagcgttgcgcagtcgagcaaagccgccaggctgcatgtacttgcagaggactccgcgcggggagtgacggcatgttgcgcagcggctacctgcgagggaaatagcctcgacgatatcagggagcacgagcgttgtgtaactgcttgagcagacggtcagttcgagtcgatgtcgcgatgaggtcgggctgcgcctccgacgagacggccgaggttgaagctctggagacggagcggccagcagcatctggccagcggtggcgctcgtgaatatgagcggttgtcggaccaacggcgcagcggcatggaggggtagcgaagtcaaaggttaggctggtcgggtgagagatgatgagcgggtgtccgggtcggcgtgagcgatggccggtgcgctcgcaaacccagcggcagtacgcctcagccggcagactgactcaatggtctggcgagggatatcaccccaatccgccacctcagctgcgagatgagcgaaaggctggtcgctatcgtcgtcgaccgtcaggaccagctcctcttgacgagggtcgtcgctgtccgcccactgactgagaagaaaattaaaaaaggccaggcttcgacgagtcaagggcaacgggccgccgcccccttgctcctggccctcgaaccacatcaccctccctcctttaaagcaccatggccgccactcccttccccgaggttccgccgacctcgcgctttgcctcgctcattccaggccaaacggttgtcgcagtgccgtcgttcaagctcgagtcgggcctcgagctgagcgaagtgcccgtcgcctacaagacgtggggcaagctcaacgcccagggcgacaactgcatggttatctgccatgcgctcacgggctcggccgacgtcgaggactggttagtccaacttctttctttctgcgttgctcggaggaggagggccaggcgagcgggtctcaggctgcctattccatcactggcacgggtcgcccttcttcccttgccgccgccttccctcgtttcctgctccctcgccctttcggtcgcgaagcgacagagagctcactatgcggggtgtttgtcttgttcgttctgagatgcgtttacaaccaggtgggggccgctcatgggccgcggcaaggcctttgacccctcgcgcttcttcatcttctgcgccaacgtgatgggctcgccctacggctccttctctcccgtgcgtccgtctttaccactttttcgtcaccggctctcggctgacacctcctccgctttcgctgcaggtcacgacaaaccccgagacgggcgagccctggggaccagagtgtccgctgacgacgacccgcgacgacgtccggtgagccaccttcttttcgcccctctcggcagctgctcttcaaatagctgactcccgttcatctctagcattcatcaccaggtcctgcgctcgcttggcgtgacgtcagtcgcggccgtcattggcggctcgatgggcggcatgaccacgctcgagtggtcgctcaatacgccggccggtttcgtccgcaacatcctcccgctcgcaacctcggcccggcactctgcctggtgcatctcgtggggtgaggctcagcgccaggccatctattcggacccgatgtacgccgatggctggtacgagcccgacgaggagggccagccaaaggtcggcctcgcggccgcacgcatgacggccctcctgacgtaccggagccgtgactcgtttgagacgcgctttgggcgcaagacgcagggtgcgctccgacgcgggatgggagggacgacgtcgagctctgcgagtgagggcgagggcgaaggctcggcacgggaggaagcctggcggctccacaacgacggccaccgcaaggccaaggtctaccgctcgaagccggcgacgccggctgcgaacgtcaacggagctgccacaactggcgagcgcgagggcggcatcctcgccggcgctcgtcctaagagcccaccgaccgtcttctcggcccagtcctacctccgctaccagggcgacaaggtgcgtcgctctgcctcctctcacatccggcgtcgccgctaactctttctcccctccccctgtcagttcaccggccgtttcgacgccaattgctacattcaccttacgcgcaagatggacacgcacgacctcgcccggccgcggctgacgacgccgacctcgacctcgtcctcgccgccgatcgccttgcccacctcgacgacgccggcctcgctcgccgaggtcctcgcgacgctcccagccaaggcgctcatcatcggcgtcgcaaccgacgggctatttacgacggccgagcaggaggagctcgcctcgcacatccgtgaggccgagctcgtcgtcatcccctctcccgacgggcacgacggcttcctgctcgagtttgaggtcatcaacaccgaggcgtcgagatggctccgcgagcggctgccagagatctacagcgcgcccgaactcgaggcgtccgaggacgggacggccgacgacggctttgacgtcaagaaggagtcgctctttggcgaggcggaggccgacgtcggccgctggtagtcttctctctctcgcccaccctttgctccctctcattcaaccggttgtactctggctcttctcaacaagccaccatccacacatatagcggcacgtctccccgtctgcgtccactgaaatcatccatgacacttcagagtcgttccgggcgcagggcagggaggggcggccagagcgacgcgcagcaagagggcgggcgacccggcgacgggctggcttcgagctgccctcgacgtcgaccttctcctcctcctctttcacatcccgactagcttcactcgctcgacaaatagtgcgcacagccaactgccatctagctcatcctatgctcttgagctgaagttgtgcccacttccggccgcacaggctcgtcctcgcagccgcctctgcagccaagccgtccgacagccttcccagccctccttgcctgcgatggccaacgccggtcactgtcgggccgttttgcacagctcgcaggccgcatgctctcgagcctgatattctgctctacatgccctcttctcttagcgtcacccgatatgccgccgcctgcgatgcctggcctgccgcaacctcctccggcgccggctctcagctcagccgtcgaccggccggcttcagagccttggccgggcttccagcgcctcctcagggggataacggttcgacctgatggtctgttcatcctcctcctccctcgaggcctgagaggatatatgagagactgacccccaaccatggcctgcagcgacgacgcggccggacgagctctcacgcgagcccaagatcggctgggttgcgagccctgcggagtgagtcggaccaagtgtcgacgcaccgtgcggtgcaacagctgacacgcccgactcgtctcttcaagcacgagcatcttcatctgcgacatcccaggtccggtctagtccctgctttgactcctgccgcacttccgctgaatcccctttcgcgcatgcacgcagactgtcacctcctctacccctcagccgccaagctctcagcccatcaagcggctggccacccagccaatcttccacgctcgagcatcacctggttccacccggccgaggagaaggcggccgagcagcacgagcgagcggcagaagcggtcaaggcggagcaggcacgggcgatcgaggaggagcgactgcaacaggctgctcgaaggagctttatgccgctctgaggcggccggatgttgaggaggctgacaagccatcgtcgattgctcgtcggcaagatgctcgtacatcgtcgaaccagcacgacttgcgccgtgccgtggtgcagacgcagcagcgttgcacaggtgcgctcctcactcttgtcgtcaaccgatagtagcccgagactattgctgaagcctgactcatacccatttgactccagtctcggtcgccggcgcggcgtcgggcacgtccatctcggcaaggcgactctcgccagcctcaccgtttggtttggccgccagatattaaaagaaggcacgccaggagtcttctgacctttgcattgccgagctcaaagcgtcaattcgcaaagggaagccctcgcgatcagacgttgctcgtatgacggcctcaccccgtacgtcgtctccctgcgtcatcgttgtcggtcctgctgactctcttggaggcgaccactcgctaggtctgctgatctatcgtaacagagcatgctaaacctgctcgactcgcgctgactggcctggtcaagctgtcggcgtcgagactcggacccagcgattcatcacccacctgtcacatccttcgtcgtctccaatctattactatctcgtcggcggaccgcgagaagtgtcactttgtcgacatagatgcgagcgcttgcctcttctctccatggcccgctctgaacgctatcttgccttgcggtagacggcggaccgcaggtcgggcttcctgccgcgcgcgcagccgtcgctcgaagcgaaggagaccgcaccactcaatgtcgtctttgcaagaggggatttccttttcctacgaaagaagcacctgctgaccttcgctctccagggcagcttggagagtgtgcgggaacgatgcccggcagcccggccgaaagaggggcgcgtcgacgcgtctcgaggtcgagcagcgacggctgactgaacgacctgccgaccacgaccgctcttgcctccccttccatccggccttctgccgtcagcccgaccagcggtgtccattcaggcagatcgacgggagaattcaccgcatcagagtctcatcgaagccggccagctagcattctgccctttgagccggacctcgactcctcaacgcaaggccctcctcccatgccgtccaaggcgctcacggccgatggcctgccggccctgctcagggccgtcggccagatctttggcgaggctcagctgaacgcagccaaccatcggaagaacgttctcctcctccgcaagattgcggccaagacggctgagctcacgagcccgcgccgcaagggcggacccgacaagcgcgtcggcgagctcgcgttcgccgaggctttcgaggcctgccttgcccgggtcctgccagtcaagaagggcgtcgccgtagccgatcggcttgtcaagtttgtcgccaagtttgttgcggccctgcttgagaagcgtgcgtccttgcgcgctcggtcaggcaacggacagcgtgcggttgactgccggcgtcgctgacctgctctcatcggaccccatccagctgagggcgcggacgacgaggatgatgaggaggacgatgacacgccggcctcgcgattctgcgccgccctcgccgccttcctcctccgcggcttcggcgcaaaggacaaaaatgttcgctaccggtgctgccagacgctggccgccatgcttccggccatgaccgacatcgagtgcgtctctcctgccatcgctttgctacaagtcagcaactgacagttcaactgccgcaccgacccagcgaggacgtctacctcgagctccgttcggcgttcctcgcccgcgctcgcgacaaggaggccatggtccgcgtccaggccgtgctcggactcggcgccttccttgccgaagacgacgatgcaccagacgatgccgaggaggacccgctcgaggtcctactcgagctgattgcgaccgactcgtcggcgtacgttcactgctcactctcgtccgatgcaactcgtcggcgcatggccagcggctgaccacagtctcggtcaaccctccagcgatgtccggcagacggctctactgacggtgccttcgacaggctactcgttcccgacgctgctctcgcgtacgcgtgacgtcgatccttcgctccggcgcaatgcctacctctcggcgctctcgctcgaaaaggtcggcgacctgaaggcaatccgcctgccgcagcgcgaggagatcgtccggaccgggctcggcgaccgcgagccaaaggttcgccaagcggctgcccacatgattggtacctggctcgatgccatgggcgacggcggcttgctcaaggtgagagcgcaactgtagcctccaccgtgcaactaccacactgacaattcctccgctgccagttcctcagcaagttcaatatcgtcgagaccgaagagggcgagaaggccctccgctccgtttttgtctcgcggcccgaggtcttccagtcgatcgactttgcgcccgagtactggacatcgctcacgcccgaaaaggcgctcctcgcccgcgtctttgccgaccactgccgcgagaccagggacggtgaggcactcgagcagtgcctgccggtcgtcaccgcccatgcgctcttcgtccaggagtattacaaccggctgctcgcgacgctcgaggagcttgacgccgacggcttggacgaggcgagggccgaccggctcgaggagcaggtcgtccagttcgcctttgtcatcaaggagctccttaagatggccgtcgagctcgactacgccgacgagatgggccggcgcaagatgtggactctgatccgtgcgttgtgctgtgtgctcaggaggatgtccgcggcggacacagctgattcgtgcttgatcgtcgtttcgcccaggcgagattattgccgagccttcgcttccaggctccatcatccccgtcacgctcgacgtcctccgccggttggccgacaacgagcgcgacctgacacgggtcgtcgtcgagatcatccacgacatccgggacggcgacgaggtcgaggacgcgctcgatggcatcatcggcggcggcagcggctcagtcgattcggacgaggttgagagccagccgggagatgcactcggcaacgcgctcggccggatgaagctcggcaaggacaaggccaaggcgtccgacccggcgacggccgaggaggaggaggaggctgcctttgccaaggccgtcgccgacgtccgctgccttcacattctccgggcgctcctcgagcgcatctctggcgtaagtctttttgcactacggggactctcccccgatccctctgaccctcctcgtccggcctcgtttgtccccacacagacgcttaacgataactctgtccttcacggcctcttgcctgagctcattgtcccagccgtccggagcaagacgccagagctgcgtgagggcggtatcgtctgcctcggcctcatctgcctgattgacaaggtgcgcggacggcgctccaatgtcccactctgctccattgacctgactttgcaatcgatcctctgcagaaatcggcggcgcccaccttctcgggcctcttcctgacgcaggcacaggccgctcagggcccgctcaagattcagatcctccagattatctttgacatgctgatggtctacgacatcagcagcctcctgccgaacaacagcgacgtgcgtctcgtctaagctggcgcgcttcgaagatcaccggtcactgactcccttctcccttcggctgacggcagcccgacaagcttgcctcgctcgtgctcttccagatggagagcgccgaggatgatgaagaggcgctcgccatcgtcatcgagggagcggccaagctgatgctgtcgggtgccctgacagatgagacggtgagcaaacgttgtcggcccgcttgccgaccagactgacctctgacgcccgcatccccttcgtcgctgcctccccaggtcctcagccaattcgtcaagctcttcctcctccccgagacggccgacaatcagccgttgcgccaatgcctgagctactttctgccggtctactgtttctcgtcgtcggtcaatcagcggcggatgcagcaggtccgtctttgtggcacaagacacgattgacaaggtcaggccaaagctgacctctcgtgtcccttctcactcgcacaaaacgcaggtcttcctcccgacgctgcggttcctgctcgatgccgccgaggaggacgacgacgaggacgcagacgtccacactgccagccagatcacggccctcttcctcgactggaccgacccgcagaagtcggtgtacgtcgcgtcgccggccagcgtgcttgccttcaactgctgacgacctcccacgtcttgctcccgcaggcaacatcagagccgcaagctcgacgaaatcatccaagtcgacctcgcaatcgacctcctcaaggcgctcttcagctccgagtggggtgcgtctgccttctgtcgtttcgaccgtgcccgtctgactcatcttccgtcttctcagacgccgaacgcaagctgttctgccagacgctctcaaagctgtacgtgcccgacgactgcgatgctggccggggcgaggaggctcagctacttgtcgccgctctcaaggaggtacgttggacggtgggcaagcctatgcaggcgaggcggtcgctgactgccaccttgcctcgctgctcaggagagacccctcgaggacacggtctcgcgcaatgcccttggccgtttctcgacctcgttcgagaaacgctttggcaagctcggagcggcggccgccccaggcgaggatgccgagccgaaggacccgaggttgctcgccgaggcgcaggcgagggtcgaagccttcctggacaactggtcccgtcccttcccttcccttcccttctgtcgagaccccggcctctgatgcgtggtttttctctccgacaacaggcgcagcggtggcatcagcatcggccatcgaaaagaggccgcacaggacgaggatagcgaggacgacgacgatgaggaggaggacggcgacgccgagtgatgctcgtcacggcgcgcgacggcgccagctctcttgtaccatgatcgaccagagcagagcgcgtactgtcggcggccgggtagaggagagctctgtgcacgtccctgaccgcgggcaacaaacgatgaggagagagatcgccggtcgtcggggtctcctttgctgcgggggcgggcggcatgctgcggggcgagcgagaggcagcagcggccggggtcaagccgcgctctcggcacgcatgccgaaggtcgacaacgacgccagcttccttcgcgacctctccttcagcaagccactctccaaggcgcttgtcgcatcaagcacacagacgtctcacataaggacccgcgacccgaagaaacgatggatggagtcggcttccacgatggcgacgacggcgacagcagcggcaggcgcggctccgacgacctggcgaccgatgagcatggcgagaagcatcagcggtgaggaccgtctctgctcgcctgatagcactgcatgtggctgacgtccccctcaccgtcccattacagcatcgcccttgcctgctaccagtgccggtcaaagaaggccaagtgctcgggcacgacgccggtctgcatccagtgcgcccggcagtcgctcgagtgcgactggccctcgggccgcaagcgcaaacggacacggaaagagatgctcgaggccgctgccaatgcggccgccaacggcgggaagactggcaggagggacgtcagtcggtcggccgaccggcctcacgccgctctcgcctcccgcagtgttggcggaggcggcagcaacgccggcccatcgggctcgcagcagcagccacgcaaggcgtccgccgaccagtccggcatccagaaccagccagggagcgcgatcgctccgccgaccagccgtccgacgcaagacacgctgctcagcgatccgtctgacttctcgggctggcagatggtacgttctctcgtccatgccggcgcgtcgtgtttgagtcaccgcctgcgcccgcgcgcgctgtgcctcctaccccgctgctgctgtccctgcccctgtatgcctctgctgacatgctgcgtcgctaatccttctcgcaggactcgttctcgacccgcggttcacagcaaccgtccgtctcgccttacctcgacccgctcgcgatcgggacggcgcgctcccctccgctccagcaggggcccgtccagacgtcgccgacggccgcaggtggcctcgccgactggatggcgtcgtcgttcggcaacggcggcacctcggccgtccagcagcagcagcgaggttccgggtcgtccttcccggctgcgccgccttacccgtcgaccttctcctcgctgcacatcccttacaaggtcccacccgatgccctgccgccgaacgacgcgccgattgcctcgggcagcgggacaggcgggacgggcggtggtgtgggaggctttgggatgagcagccttagtctcggccacggactgggctcgacgaatggcggcggacggtctagcgccttcagcccgagcaagggtacaagcgaccagccgcagtatcagcaacagcagcagtctgagggcgcgaaccagagcgggatcatgcgcgcagtggcggaccaggtcggctatctcgagggcgagtcaggcgagccctacctcaagctctactactaccgcgtctcgggcaacactgcaatccacccgggtatcaaccgcatctgcctcaagctccagctgcggccaccggcgccaacgtcgcctgccggctcggccacggccgtaccaggaaccgtcccctctgcgcctcagccgcgggctgacctgcaggacgtccaattcgacccgcagacggacatggcgagcccggtcgtctacgagcccctcatcgagcttttttacaagattgccggccagcatttccccagcatccagcgcggccggatcgccaaacggttcgagcagggccagatgagcgcctttctctgcaacgcaatgtgtgccctcgccgcccgccactcgcctctcggccggtctaacccggtcaacgccggcaatgccttcctggcgaaagcgcacgagctcgtcgtcccgctcctgcggatgccgacgaccgacggcgtcactggcctgctcctgcttgcctgggccgagcacggtcagaactcggagagcggtttctgggtgagcttcgcttcttgcgccgaccgaattctggcacgttcctgacgtccctctcgccacgtcctccgccagcaattctcgggcctcgccatccgaatggccgtcgatctcggcttctttagcaataccgacgagatgtacgaagactacgcccatttcgtgcggaccaagaacctgctctggagcctgttcatgacggaccgccttctcgcgctgagcactggccggccgtgtacggtgcgccgctctttaacagctgctgtccgctgccagagctgatgccgaccctaactgccgtccgtagattcaagagtccgacatcgagatcccgctaccggtcgaggaggaggtgcccgagggcccgcgcccgccgggcaccgagaatgatccgcctttgccgtcgccgttcgtctggtgcaccaagctcatggttctctgcggccggatagcgttcgtcccgtcggctaggcgtccttcgtcactgttggacaagctgacgatgagatctcttgcaggaacttgctcaacggctcccgcggccacgcccggacctttgtcctgcccgactcggcctcgacggccaagctcaaggcgctccagaccgagctcgtcgacttctacagccgcatcccgcagagcatggtctggagcgtcgacaacttcaagaaccaggctcagtcggagcgcggcggcgtctttctcatgttccactgctggggtgcgtctcgtcttgctggtcttgctgaagcgttggcctgacatacttctctatctctcgactcttcagcaaacgccgttattgctctgcttcatcacccggcgatcatgttctccccatcgggcgggagcgacacgcccatgaccaaggcaatgaaccgctcgatcaagctcgcccttgcctcgagccggacaatctgcgagtgtgccgtctttgccgacctgtgctcgcctatctcctacgtacgtgcccgaccctgctgcccaacgcggaccacaacattgctcagctgaccttgccacacgtctctttcgaccctgacagacggcctcgccagggctctcgcagacgctctacatcgccgggctcgcctttatcgccgagatgaagcacgcctcgctcggcctggcctctgggctgaacagcgccggcgactcccggccggcgtcgcccgcagctgcaggaggcgagagctcgagctcgacggccatgcaggcgcatgctaaggacggcttggcgacgccgcaggcctcagacacctttctcacgctcctcgcccagcagaacctcaacgtcattgtcaaagccttgcagcagatgactcatttctgggccggagcgggcgtcatgctcaatattctcaagcagcggtcgcagggtaagtcgagcggctgacaagcccgcgagcacccttctgattggcaggcgggcgtgctaacaggcccatccttttttgcactctgcgccgccaggtatgacctacgctaagattgacttttctgcgacgagcgacgacatcaagacgtttgtctcgctgccagactcgggcgtcctccggcgatttacgagcgatctcgccccgcccggtgcgtccgatccagccggcggcggcggcgcgaacctcgagccgcttctagaggttcgattgattgatcgtgccgcgcgccgacttgtttgctcccctccaccgcaggcctcagcccggccgagcagcttgctacgattgcctcgatgtcgccggcctgcagccccgagtcgaacatggtccctgcacctgacttttccggcagcgccacctgtaaggccgcctctccttccgctggatgctctggcctcgagggccgaggccaatcaacccccggcacgatgcaggccggctgacctgatgcctcgctcttgcactccatcccgcagtccccgacgagtggaatctcgacagcctgctctcgtcctactcggtcgaggacatgagcgtcgagccggccggcggcttctggaactttgacagtctcggcgagtccccttcgtttggcaccgccctttagcatgccctgtatcatttttcgaaggcgtcccgaggcagacctgagctctgtggctagcgagtgtgggtcagaaggtctctgttgagctgctctatctgctcgccttgatgcctcgtgcagtcccgaaggagagcgcctcttcccgttcgactggagacgtttgctgaggcgccgcacgcaaggttcaagtaagaaagatcatgctcgtgagatggacgtggtggagacgatacaagaatgagggcggagagcaaagtgtgtccaaaagggaatgtgtgctggcggcggaatgggatgaaggcggcaggcgtgctctagtaaagaccggcggcaacgccgtccttgaacgtctggacgatcgacttgaagccgccctcgtggaggacaaagccgagcgagagcgagtagtcgttgttgaacgcccgaggccacgagccgacgatccgggcgttggtcgggtccttcttgtaggtgacgaggtcgagcgtctcctgaccggcgacgtcgcggagcgcctcaagctcctgcttgacggtgacggtaaaaccagggaggttgacgacgcgggtgtaaggcagcatcttgctgctgtcgacgtggctcgcaatgatgaagttctcgatgacgttctccggcgaggcgacccagacctcgagctcgtcgagcgccgggtcgtcaaacgagtcgccgatcgggcagacggcctgctcgccgtggagaggttcgcggatgatgcccgagacgaaagccgatgtcgctggagagggcacgccgggccggacgacgatggtcggcaggcggatgatgcggccgtcgacgaagccgcggcgcgaatactcgttgacgaagagctcagcaatcagcttgccgcagccgtacgatccctcgggccaagtgatcgtctcgggcgagacctcgtggggctggagacgaggagcaagggatgtcagcgtcgggcagggattggggttgggatgggtgcctggagggggcggacgcacgagagggccaccgaagacggcgatagacgaggtgaagatgaacttgacgggcttctcgccgccacaagcgcgggcctgctcgagcatgagccgggtcgaatcgacgttgatcttaatgccgagatcaaagttgtcctcggcgccacgggacatgatgccgtggaggcagtagattgtggtcggctttccgagcttggtcttgaaaagggcctcgacggcctcgggctgggagaggtcggccttgatggagacaaagcgcgaggggtcgaggtcctttggcggcttgggctcgacaatgtcgaccaggatcaggttgacgtcgggcgtcttggcgtccgtgaggagctcggtcgcgagcacaccgccgagccagccgccggcgcctgcgaatcgtgagtagaggtggtcagcaggagcgggctggaggaggcaaagcaactggtcgctcaccagtgatgagaacagtgttgaccatagtgagaagaggtggatgaggaagggggatgggagctgttggttgagggggaagagatggatgttggtaagaccggagccgacgcgcaaggccacgcctctttagggagacccgcgctgactgaagtgccggcgagagaccgactcgtgtttaggcccgaagacgcgagtccgtcccgatacattattgcggcggcggcgaggagagctgcgagcgctcagagggagaagggacggcgtcagccgacagagcgcaggttcccacgcttaatccgctcccggccgctcgggccgctccgtgggcaaggctctccacggcaaaggccgcccgcccctccaccaccgtctcctcgccgccagtgcgtcatctctccctctttctctctcggagtaacagaatagacaggatggaagagctgaggagtgggagaaggggctgacttcgtcaagctgctgacccctttaccggcctcttcgccttctggcgctcaggccagcctctcctgcgatctgcttccctcaaccgtcgctgttccagccatcgtgccgcacattggcccggcgaaccgacaacctcacccagccgcctgacccccggagcttcgaggggacgaacggggggtcccgcaatctacagagccgaagaaacatcagaacgcctcgtccgcggccggccgttcgttcacaggccgtaccttcgcgcccgccggcttcaaggcgtcggccagctcagcgattgaccgactgacgcattctccataagaagggtgaggacggacgaccccgcctttctccacctccactcgcccctcaaccgcccgacctggcactcccccatccgacctcaaccctccggacccacctactcccttccgaccgcctcaccttcccctataccccctcgaaatgggcatctttggcggcaagactgagaaggcgcagacggctcacgttgagcgcgcgccctctcccgaccgagtctacatccccggctcggccgaggagaaggccctggttaggaagatggaccgacgcttgatccccttggtctgggtcatgtacatcctctcctaccttgaccgggtgcgtctctttcttcctcggtggtcgaccacctccgacgagaggcgatgagctgacctcagtcctccaccatcctcaggccaacattggcaatgccaagtcgggtggcatggagaaggaccttgctctgacctcgaaccagtactcgatcgtcctccttgtcttctttgtcgggtccgtcttgcgctcctcccgtctgttgtaacgcgaccgcccttagctgacgcccgacgctgctcctttgccctcctagctacgtcctcggcgaggtcccgtccaacatgatcctcacccgcgtcaggccttcgatctacctcccagccatcatgtttgtctggggaggcatctcgatcgccctcgccggctgccactcgtacatcacgctctcggtcgtccgcgccctgctcggcgtcgtcgaggccggcttctcgccgggcgttctcttccttctctcgtcgtggtaccgtaagaacgagctcgcccggcgcttcgccgtctactacacagcgtcggcgctctcgggcgctctcggtggcatcctcgccggtgccatcacgggcaatctcggcacgccttcgttccagggctggcgctggtgcgtccttcctcgctccgcctcgcatccctccaaagttcagcagaattgacaatcacctcggcctccaggctctttgtcattgagggcgccgccacctgcgtcgtctcggttggggcctacttccttatgcccgactacccgtccaacacgccctggctgacggacgacgagaagtggcttgcggccgcccggctctcggccgacgacgtcggctcgaccgacaccaagcacgacggccactgggcgtcgttcaagcagtgcacgaccgactggcggacctggctcatggtctttaacttcatgatggtcaccggctcgcagacgatccagtactttatcccgacgctcatgggcaacctcggctacaagggcacgatggtccagtacatgaccgtccctggtgcgtcttgctcgtcgcctttcatgctctgctccctcacctgcctgaccgtctgcgttcctgctcctccagtctactgcgtcgccgccgtcttcatcatcgtcatccccttctcgtccgacctgcgcaaggagcgcccgttccacatctcgggctcgctcggcatcgccgccgtctcgtttgccgtcatcatgggctgcggcctcaaggctctcgtcgcccaatacgtcttcctgtgcttgtgcgtcgcccctctgccttcgtcctcttccctgtcctcacgctgacccgccccccttgatcactccctctttcagtgccattggtggcatctacgcctgcgcgcccctcgttctcgtctggacgtcgaacgtcatctgctggcctgccgagaagcgagccgtcacccaggccttcgtcaacgcgctcggcaactcggcctcgatctacggatccttcctctggccaaagacgacggcgcccctctaccgccagggctttgcgacgacgctcgccatgtgcgccgctggcgcgaccatggcccaggtcacgcgctacctcgtcaacaagcacccctacgaggtgcctgatgaggtcgtcgcctctgacgagtcgtccgaggtgctcgagaaggagcagtaccgcgtctaaaggccgatgacccgccgcttcgcttctcctcctcccgcgtctcatcgtcatccgctacgctcacgctcctgtaaatgccctcgtcctgctcatcgctcctggcgtcgcatgttgcaatcctccctcatcgcccgctcttgtactcccagtctcttgtttccatcctcccctcttggctttcgtgtaccgatgctcttctctcttggtcaaccgcggcctccagattcctaccggcggcgagcctggcgacgagctgtggagattacctcaggttaggcccatcctggttctgcctgccggtcgggagcggggccaatcgcaggctactggggtcgtgagcgttgtaagagagagcgtccgggtgagcgtcggtcggagagaatcagcgcagagcacagcaacgcgccagcgactgcggctcgatcccgaacggtctccagcgccgactcgttgcaggtccgggaggtagggtcatacaagcggaaggaggaggtggggtagatatctgtgcagagggaagaggtgctattacgagggcgcgtggcagagggcgggtatgcgccgtgaaagagagaggtgggtcgtgaagctgtcaatcaggaagagcatgaaggagctgagctgagcgaaaaaagggagaggcagggcaaaagggcctgtaggaggcagcatctgggccgcgcccgaggagcgggaaggggcgccggggaagaaggataaggcgcgacgtcctggttcgcctccttgcgctgcagagccgcccccgagcgatgaccgacgactttgacgccgaataccgccaaggacaagctgggcggtcgtgaagaataatggcgcaagcaggaaggccaggaccgccacttatgaccagatctgcgcgggggcgagtgagaatgagacgttagcgtctgctcgagctagaccggggtggaagcgggcaacgcaccttgagcagtctgtaaattgaaacaagtgagcggctggtcagcaagggtctagggcgaggtcaaagtgagccaagacgcacgagtcccacgagccggtggcgagtgccatgccgtcctggctgacgccgaggcacgagacgcggttttcgtggccattgagaacgccgacgcgctcgccctttgggaggagcagatgcgtgtgtcggagggtagagcggtgaggaggtcaatcgaagaaaagtgaggcgggaaggaagggtcggtcgagaggagaagtcagcaacctggtttcaagaacgagaagcagctgcaggacagctactcgccttgaggacatcccagacgttgcagttgttgtcgtcgtagccggcaaagaggatgcggcccgagaccgaaaaagcgaccgaggtgatgccgcagaggatgttgtcgtggacaaacgtgttgagctcgcgatcggcccgcatgtcaaacagccggcacgaggcgtcgtcagagccggtcgcaaaggcgtcgccgttcgggtagaacctgaggagggaaggaggcgggcggtcgtcgtcagcggtcggcgcagagaagggtcggcgcgcagcaagccgggcgcactggacggcgttgatgtcgccctcgtggccggtgaaagtctggaccgccttgccgctccgcacgtcccagacctttgccgtcgcgtcgcacgcgcccgagacaaagacgttggcatttggcgagagcgagaggctgcggtagagggggagagaaggagggaggctcagcgcctgcgggtcggtcgcagagcatcgtcgaggcgacgtacgacatgacgtcgccggtgtggtccgagaagtccatgatccggacgccggcatcgacgtcccagagcatgcacgtcatatcaccagagctcgtgacaatctgccggtcgttgatgaagcggcagcacgagaggtagccgctgtgggcgctcagctcgcgaacggccttggcccctccgccacccggcgccgacgaggtgcccgacttgagcgagtagatcgagcagacgttgtcgaggccgccgcaggcgacaaagttgcccgagggcgagtaggcgcacgtcatgacccagctcgaccggagcgggatcgcatggaccttgttcgtcgtgtaggcgtcccagacgatcagcttaccgtcctgcgaggccgagacgagatgctgcttgtcggccgcccagtgcatcgcgtagatcttggcgaggtggcccttgagcgtccgccggggcttcatgatgacccgcggcaggggctcgatctcggccgcctgggcgcgcactgcgaggggtgaaggcgaaaggaagagggagcaagcgagggaggaggcggaggagggagaattggtcgtcagttcagccttcagcagcagccacagagagatgaaagggaagcatgaaaggatgggaggtctgagctcaaccgaggcgccctctcctgttgctcaacaagctgccttctcccagcctgcccttcaggcaagccgtcccgagcggcgtaaggtcgtccctgagctgtgcctcatacgaggggctgcagaaggagcagccaggcggcctgctgtcaggcgaaaggcaggcgagctccggatcgcctcctctcagagaggagagctcgacgagccgggctgacgtccttcccttgccgggtgcccctcgaaggtgcgccctagacgagcactccctcagaggtaagcagctccagctcgagccgaaaatcggtcgagcaaggaaggtgaggtggaaggtggtcgagcgaagccgcagggaagggaagggacgacggacgcacagctcgagtcgcccgtctgctcgcgtttggcccggatcttctccttgaggccctcggcctcgcgccgggcggcggcaatcttctcctggatgtcgacggcggacatgctggcggcggaagagaagtgtgggagggacgagaagggaggagggctgggaaggatagaatggcggttgcaagacaaggcgcaaggcgggtcagcttcgagagaacaaaaggggggacaaggctcggagaggcggcgcgccaggcgcagagcgagcggccgatctccagcggtgggtcccgccctcgcgacgacccttcgccatctcgctccgagtctacgcgcgcccgtcgtccaatccacgctcgccgcaggagtgcagggctgacagggagagattattgagaagaatggggcgcacgaggttcggagcgatgggctgaagggcggcgcggaggaggcgggctggacgtgccggtaccggtgggatatgccgaagtgggttgcctcgggaagccgtgtcgggtgcgactcgtgggtgaagagggcgaggtcggtaggagatgagctgtcaggctacgtcgtcgagatgagggctcgagctgctgatgggatctcggtcgagcagtctgtctgtatggcggtcgctcgagacaagcgcgcgtgcgagcgcagcaatctccacggccgacgagctcgtccatggctcggacgacaggccaagccacgacgacgatatcgacggcgacgagctgatggcgatctcgattcggcagtaaggatggcaggacgagggcactcggtcgatctgctgcgttgcggcgctgctgctgccctctgtctgctgctggcttgcagctcaccgcccaacggccgagccccccctctcccagcatcctcccgtcggccgggtcgtcaaccgccaggatcacctcgccgctgacctcttcctgacgataggacgtttgcgttcgtctagctgcgatcccgctcatgcggctggcgccggcatgggcttgccaaacgctcgtcgaggcctccgtctgccttgccgagacggaaatagcttgctcgcggtcccgaaggaggtgtatgcagcgggcggtcacatatatcaacagccggatagcagcgggacgagcagctcttccgaccaggactacgaccttctccctttcgcctcacacactctgccctctcgcctgcccttcgacacccgccgtccgccatgtctcctcgcaacctcagcctcctcactgccgccgctgcggctggccttctcctgaccgccggccagagctcggctcagtacactgcgacgtgcgtcccctcgtctcaccttctcagcctttgcttgacggatggcgctggcgggtcgatgggctcgtctatcgcttggccggtcgctctgctgcgagacgccgcactctcgcgtctggctgcctcaccgggagcagcgggtcgtccgactgcggcagcctcgacgcgtcctcttctgaaaacaataacagacgactgacgcgtcgtgttgggttcacagatacacgcccgacacggccccgccgacgaccgaggagggccagacgggcaccaacgcctgcggcaccggctcgagccagacgtcaaactgccaggtctgtcttcatgtgctctgacgtcgctcgctcccgccgttaaccctgggtcgagcgttctcgctcgcgtgctttgcagaacgcctacgtcaactcggcgaccgacttctgtgcgactccccttcaccccgtctgtactggaagacgtctagctgattgcccgtcttgtcaacaggtctatgggcgcctccggacacgagctcgccctacggcacctcctcgattggcaacactgagcggctcgaggtcgcgtgcgtctcccccatcccccaagctcttgcgccgcaaagctgactaccctatgcctgcgcagctggtgcacgaacggcggccgcggtacacgcattatccccgatgggacgatcacgagcgtccagttcctccagaccgagcggtatatccagctgagcgggacgatggacggcacgaagcttaacatccccgcgaacgacgacgggggcgagctcgacccgcacggcgcggacggcaacggtcagtctggagcgcgcgggcgctgacttggcgagaacgtacggcctgacaatcagtcttggacgatgtgcaggcaacccaatcggcggcctcgtcttctcagacgcattcggtaacggccttcagcagatccacgagtggacctccttcatgagcacgtgcgtcgagccgtcttccgccctgccgcagatgcagacgccttacgagtggcctcttccatctcgaaatttcgcagcggctacttctgcttccgggcgtgcatcggtgaccaggcggccgagtactgccaggtgagtcggccgtcgttctgtcttggccgatgaaggaaagcgctgactggtcgtctcgctctgcagcacatctacgagtgagcgccgcttgtcggcgtgacgtcgtcctgccttcctgctgactcccactctctgcgcatctccttagcacgctcggctgtggatggaatatggcgcaaggtgagcgaaccctcgaaaaaaatctgccgccgtgatgactgacctcatactcgtctcaggccaatttgagggcgtctcgcagtgcgacgctgacgttattgagccgatgggcgtctacggcacgagcaccttccatcagggcgatccgacgacgcctcccgcgcacccgccggcggcgacgtccaactgcaagacgtttgaggccgtcggaggcggcattacgggcgctgcggttgcagccgtacggacgtcgtcggctgcttcgtcgggtgcgagtgcgtccttcgtcttcaggtctggttcgcgcaggacgctgacgccaacaatgctgttctcctgcttgcataggctcggctgcgtccgcctcgtccgccatgcccagctctgcctccgtctcgtcgttctcgtccgccagcagcagcagcagcaacggcggcgccgcctcgtcgtcctcatcctccatatcgacctctgcccgctcgtcttcggcctctctcgcccgccagagcggcccgtccatcgccgtcgccgctagcagctctccctccgccgcccagtcgagccagcccgctagcgacgcgagccgcacgacgccggcgatggcggcggcgctcgcggtcgttctgggtggtgctgctgctgccatcggctcgttcctgctctgagctgctagcctttcttcgcacttctcaactcccttacccctcccgtatagatttcatcctaatcgcgtcgcctgctcctgcacctccgttcttggccacagctgtaccattaagcctgcccctgccttctcgatcatgtccttttcgctcaaatctggtcgcatcctgtcagtcgcgcggaggagagctcgtcagaagaagaaaaaaggtcgttcagaccttgcaaacgacagccgacgacccggtctggacgagtgctaagggcgtgcgtacggccggcaggcggtcaatctttggaaaaatccgacggattctcgatggcgggcgtcccgagaatctgcccgggcgctcgctggcactggcgctggctgcaggctggccggacgaagagggcgcgcgcgcggtcggtcgatcgccctcctctgccgcgcgctgctcctctctctcgttttggctggccgctcctcctccttctttctcaccaccgggactctcttgtgcatcccttcgtcaccccgccaccctccctacccctcccccctttcgatgatctctgcccttcttcaggaggtcgagcgctggatggatcgagtgggggtgtgaaacgtgatgcgcgtggtttccggcttcacctctcgactcctgcggtcgtccgtcgcgacagctccctcgcgcaaggtcgtcaaaggtcgtgaaatcgcatcgtgaatgtctcctctcctcttcgcggccatcgctctcgctcaactagtattcgccgtccgcgcgcagcgctcgttgccgagctcgcgatgttgttgtgcgtcggaccctggccgacagtaggtcgcctgcacggccggttcgtcgtggaagagaccggctctgttggcctgcgaccaggccaatacggccagaccaagcgtcctcggggcgaccggcctcgcttggggccctacttcttcttgcgcttgggcgcgctcgccttgccgcctgcgctcgcggccggcgccgtccgcttcttgctttcggcggcgcgctcggtcatctccttctggatacgctcgaactcggcgtcgtcgatctcctggaaaagcgagcagaggaaggcagatgcgaagaggatgtaagttttggccgtgacgttggagcgacggtcgctagggaggaggtggacgcacggccggtgacgcaagctgcttttccttcttgcccttcttggcggaagacgccgccagcgcgcgggcctcaatgtctgcgatcgtgttggacgcccggtcggccccgcgcttgaggatgagcgcccggagcccggcaaggtcggcgtcgtcgtcgctttcggggtcggctgccgaggcctgtggcgaggagcgagggcgtcagaccgcgtagcatcggtgagggagagcgagccagggtcggtgacgcacagcagccttgcccttgcccttgcccttccccttcttcgactcgctcgtcttgccgctcccataaaactcgtcccaaacgccaatctccttcgcgtgttcctcggcctcgcgcgcctccttgcgctcagccgccgcccgcttcttcgccgccttgccgtccgcggccgagctcgtccattccgccgagcgctcgagcgagccggcggtgagggcctcctcgatgagcgtcttgaagcgggcctcgtcggcggtcgaggcgcacataatgtcctcgagcatgtcgggcagggagccgtcatgcgtccgataggcctcgaggacgtcggccttctcctcgtcggaccctggagcggagcgtcagagagaggacaggacgtcagcacggcgcagcgaaagcgactggacgagtggccggccagctcaaggtcgacgcgacgcaccctggtaggccgtcctgatctcgtcgagcttcgaacgcgtcacctgctcgaacgtctcggcgaagtacgcctcccagccggcggcggcgccctcctcgagaaacgagcgttcgtccgtccgaccggtcgtgtcgtacctgcgatcagaagggcggaagggcgccaggtatcagttgcgtggacctccggagccgatccgagagctgcagagccggacgcaccgcttgcgtcgcgtctcgtccttgaggacggcgtaagcgtacccgacctgctggaaggtcgtcgcctcggccgcccggacgacctcagtcgcgtgcgagtgcttgtccgggtgatgccggagggccgccttccggtaggctttctgcgagagggttggatcgtcagcgcgctgcgtccagcaagctcggacgggttcagcagctgggacggacggtgatgtcagcgagagtcgcgtcccggctgagaccgagggcggcgtagaggacctcctctttgccctcgccgtctgggaagaattggctgattgggtcggcgtccatggtggggtgcaggcggcttgctgatggtgctggagacgacggcgcgtcgagcgggtgggcggttcgacgcgtcgagcggcccacctgcagagcccaactcgggccttcgttggggctctcggccgcatctcgcgcttcgacgttttgcctcgcagcgcgacgcgcctcccttcgccttcaacccttcgctacgagagcaggcctcgcccaccgacacgacctcgataacaacagcagccgcagcccgacactcgttcacaccttctagtcaaaccgcaacgacactcgttcactctttcctagcgccctctctctcctttgccagcaacacccctctcggcaggaccgcccgaaccgacgcgcgccgcccactcctcgtcgcgtccctcctcgcgcaccaaccctctctttgacctctctccaccgcactcgacataatggccgccgtcgtcacctccgtcccgtgagtctgcccccaggttctcaccgcttcttccgaactatcgctgactgcctgctccgctttgctgcctcccagtttcacgctctcgggagttgtcacgatccctggcatcggcgtcacatccggcgtctcgacgtcgttctcgatgcagacgctcccggcaacgccggcccctgagccaacgacatctgctcgggctccgctcagtgcgtccagctctcccccttctcccggctgcaatgtgccgctctgccggaccttgtgccggctgttgacgtccagcgacgggccgcgcgcggcgggggcccgctagctcgcaaacgagaccgacgctgaccgcaatcgacgcatcgcgcctcttcttgcagtcgaccctcccgtccggaacccaacttcctcatccacctcttctgtattctcctcgagtgcggtcccaacctcgtcctcgattccgacgacgagctcgaccagcacctccagcactcagcgcactctgacgctcgcgaccccgacctcgacggccgagccgacaacgtcggagaccacgtcctcgtccagccgatcgagcgcatccgcctcgtcgtcgacgcgctcgtcctcggctgcgactgcttcaccctcacgcgccgttgctgctgccggcagcaagccgggagagctctcgacgctcgctcgctcgctcatcattgctggtgcagtcgtcggcggcctcctcatcctcgccctcatcattggcttcttccttcgccggctccgccgtaagcgtcggaacgaggacgagcagctcgggtccgagctccaggaccagggcggcaagggcgcgtacggcggctcgaccggctacggctctgccgccggcggaggctggggcgccggcaacgacgacgacgaccagtaccacgagaagccagtcgcggccggtgcggctggcttcggcagcggcggggcctttgtcaacgcgctcggtcgcgacggccggccggcgagccctgctggcccgggcgccctctacggagccggctacgctgcgagcgacgttagcctgcacggccaggcgctcggcactgaccatatgggcggcggcggcgccatgtacggtgttgacgtcagcaatggtaacgtgagttgcgccctgccccctgcaacaagtcttgcgcctcggctgacagcgtgcccttttgcctctctagcagagctacaacggcctcggccacggctacccgccgacgagcccttactatgacggccagcagcagagccaatctgccccgggccagtactttgccaaccagggccagcagcagcagccctacggcgccgacgcctactctgcgtacccggccgtgccgtcgacggttgcactcgcgtcagcctacccggaccaatcttacgacaacctcaccgccccggcccagccgtacacggcctcgtcggtccctgccgctgcacccacggctgtcgcgacggagtcgtcgacgccgatgcgcgtcgtccgtggcttccaggcctcgctcgcagacgagctgccgatccagccgttcacgacgctcaacctcctccagacgtacgacgacggctggtgcctgtgcgaggaccccgagacaggccggcagggcgtcgtcccgcgtgactgcctcgccgcgcccgagctcgtcaacggccagatggagacgggcgcccgcgcgctgacgccgaccgccggaagggccgcatcgcccgtcgtgtccgctccgctgccggcgccgcctggcccggctgctggtccgcccgcgcccgtcgtcgacgagaagcgggctcttgcggccgcggccgccatggcctacgcctcgggcaccggcagcggtgccgccgacgaggagcctgagcccatcccgtacgccgaggaggacccgaacgggcccgcccggccgctgccgacgctccctccgccgtccttctccgagtcgaacctcgctgcggtggccgagggcagcagcagcgccggcgccgcgcttccggccaacgagtacccgcgcgagaaggcggtcgcgctcggcgctccgttgtcgacgaccgccgccgcccctgctgcccctccacggctcgacctcgagttcggcgctggcgctgggcaaaagagcgcgccgagtgcgagcggctcgggcttccctcggctcgacacgtcctccagcctggccgtctcggagcgccaggagcgccggtcgtcgctgatggactcgatcgccgccgccggagcctacctcgagggcaacggcgcgccggcagccggccagcactcgcacgctcagtgagcgctgccggctccactctccatcctgtccgatcttttccagacggccactactggctagtgccttcccttctctctcttcctgtgcatagattgattgctccttttgagcctcctctcgttcaaacccctcccccgtccctgcgtgtctgtactgcaatgttcctcggtctccctcttccctttcttcgcaccgcctccttcgcttcctttcggtctccaggctggatgccatgcttccctgctccttggcgtgctcgtcgtcattgcgccggtgggctgctgcgcgatcgtcgtccggctcccgccttccggcccttggtcgcaagaccgcttctcgacgcttaaccatcaccctcctcccacctcctcccttttcgcccagcatgggtctcgtctctgaaatgctgtcgacgacggcgtcgtcctgccaggcctcgatcagcgtcctactagtcctcgccgccgggtgcgtccgggccggggccgcgcctcggagcgagctcattccctctacataactgctgccaagctgactgctcgtccttgcccacctcctgcgcaccgccgccatcagctataccgcccggaggtccggtctagttaccaaagagggcgagcagaacatcagcaagctcgggacgacgctcctcctgccatgcctcctcttctccgagatgggcccctctgccacctggtcggcacttaagagctactggccgatccccctttgggcgctcggcttccagctgctctcgctcgcctttgcgatcagcctcaaggcagcgggcgtcatcccagccgcgtttgtgccgagcttctgcttcaacaacgtcacgtcgctgcccttgctactcatcgagagcctcagcgcatcggggagtctcgacgggcttgcggtcggaggcgagagcgcctcaaagctcctggccaaaggccgcgtctacctcctgtgcgtgatcgaagatgcgcttctacggctaaggaggtccatacctgacgaccgatctgcgcatactcagcatcaacgccctcgtctccaacatctcgcgcttcgctttcggacccgccctgatgtcgccgtcatcctaccacgagtccaacttcttgccgtcgaccaagcaggacaaggcggacgcagaggaggcgtcggaggatctgccggagcacgccgacgacaaccggcggcaggacgctgaatcggcgccgctgctaccccgccgggctcgcggaggccggattgaggcgggcgttcagcgcgtgagtcggtcagaggtcggcacggtcgcccgcaagattgctggtgctctcaacccgcccctcgtcggcggtctcctggccatcaccttcggcctgatccctcctttccgtcacgtcgtctttgagaagggctgggccggctgggtcgatccgctcacgcaggccatctcgaagcttggggcgctcttcaccggcttgcagatgtaagcctccttcgctgacactgtgtgaatctcagcgctcaaaatctgatcgccattcttaggttcatcctcggctcggcgctgaagagcaagaagtcggccaaagtatcaaagcgcttccttgcgatcctctttgcatggcgcttcgtcgtcgtgccggcgctctcgatcggcgcagtgtggggcgtctcaaagctctcgagcaatatcatcgtacgtccagtgtcaaccgctagaacgctgcgggaccatcagctgacggggcgacgctgcctgcagaccgacccgacgatggctttcgtcctcgcgatcgccccagtcggcccgccggcgctgacactctgcgctatcgccgacctcgccgacatcaccgaagagatcgaaggccagatctcgcgcatcattctcctctcgtacgcggtcacgccgttcatctcggtctcggtcgtgaatctctcgtccctctgctgtgtttgagtcctggctagggctgatcatcgccttccacaccttctcgttaggccgccgccatcacggtcgccaagacgctcaagggctaatcattgacactgttcacactgcatcatgcacgctgtccgatgcactggcagtcttctattgtcttctgtggacttgagcgacacgtttactgggcaggcagatggcagtgcgcacgtaagaggatcatcacaggcgctggaacgtgttgccgctcgcgctgcggccgcccgtccgtcgcttctgccggccatgcttctccacgcgcacgcactcctcgtccgcgccaacggccaatgacaaagaaaagaacactttgatacagcttcttatgagggcaagcttctaaggggagtttgtgtagaggaaggaaaggaaaggggtggcgcaggagaggttttgtaaaaagggcggattttgaacactgggcagggggttggaaagcagcggctactggagacaacggggttgggaagagggagcgaggggtggagagaagaggcggcgtgttcattgaggggtggtgggacagatggaggggaggagaggagcagacaaggctttttacttttgttacccggacgggaacgatgcggacccgacgcgcagggagggcgccgagcggagattgcgggggctttacaggacctggaagaacggctagatcaaggaagagggtgcgtgtttcacatgccgttgtagaaagggccggccggctgctggccgaagtcgccgaggccgccggccatgccgaaaccgccggcgccgaggccgtactggccctgggggccgccgccggcgacgttgccaaagtggtcgagctgctgctgctggaggccgccgccgttgttgccgttggcgaagccaccgagtccgcggccgccgccgtaggcctcggcgagcgcgttagggtggtgaagcgcccggttgccgaggttgcgatgcggggcgtggaccggcggcggcgggtggttcatctgcccgatgccgcctccgccgccgagggcgaggttaagcagggcggcctgctggttgtagccgccgttgccacctccaccgccgccattgccgccgccgtaagggtggtggtgctccatgtgctcgcgctggagctttgactggatccgcttgccgtagggcgtgttgcggatcatgggaaggatcggccgaatgcactcgacaaggagcatgcgctggcccggctcggcgtagtcgagcgccgtctggacgacatagttggcaaacgagtcgcgcaggagcttctcgagccggttccggttaaggagctcggcaatgagcgccttacgcgtctcaggttcggcgacgcggatgcacttctcgatgacgttggacgaaaatttctggaccgagagtgcgcagacgttgccgaagaactgacgcgtgacggcgtcgctgaagcggttgtcgttgaggtcgaggacgtattgctgcgggcggtagaggggaggcgatgtcagcagccagtcagggtggaaagagcgttgcgcaagggaggcggcagacgcacaacgacgtagttgccgaaggggtcctggacgagcgtcaggccgtggtaggtaatctcggtgacaagctggacgcgctgcgagtcggcggcgtggtcgatgcaccgctgaaggacgcagcagccgtgccggtgggtggcgacctcgacgcagtgggcggcgacggcgttgtagatgaactgcgaagcgggagaagaatgagcaaggtcagctccagtgtgacagcctttcatcagtgaccgaaggcagacgcacctggttatcctcggggacgagccggttcaggcacttctggatgacgtggttgccattgaggtccttgatgagcggcacgacgctcgcctggagggccatgatgatcgagtggatctgaaaaggcgcggtcgagggtcgacgagcgtcagtccgaagcgctcatagggaagagggtgagaggttccgacgcacctgccgcggggtcgagaggaagtcaatcatcttctggacggcgcgcgtgccgtgcatgttgagcgagacggtgacgaggtcgggcgcgaccgactcgcagatggcgttgcgctgctcgtcggtcgtgtgctcgagcagcttctggcagaggtagttgccaaacgggtcggtcatcaggtccgaaaagtggccgtacgtctcgcggaagatcatgtcgcggtgctcgggaacgccctcctcgagcttcttctggaggtaccggcagccgtgctggtccttgcagagcgggagaatctcgccctgaaggtcctcgagccgcgtgccggcaaaccggttgaactcggtgtcgcggtcgagctcggcccgcttgtgcttgacgccgccgaggccgtcaatcttggagtcgatcgcaaacgagttgcggccgtcgtagtcaaagccgtactggcccatgccgcgggcacggccgccgagaccgatcgattggtagacgttggggtcgacgacgccaaactgcaagaaaagagtgcgaggggggtcagcagctgttcttacgtgcttggcagagccagcgatgggaacccacgtcgtcgccgagcgaggtgtagtcgtcgccgctcttctggaagccggcgccgagcgagcggctgaaagcctgcgtcaggtccgggttcgagaagccgcgggccggtccagcgccgagaccaggcgtcttgtcgccggcggtgccgttgccagcggcggcggcgtggatcgcgggtgaaatgaggcccgactggttgccaaagttgcccgagagggtagccggcgcggcgccagcagcgagcgagcggttgccggcggccgacgccgtcgacgagggtgcgaagccgacctgaggcgtgccagggaccgagcgcgtgttgagcgccgggtggtgcggatcgtgcgcgggcgaggcgccgccccggccgaggccgccagcgacgacgcccgcggtcgagacgcgaggcgagacgttggtcgagccaggggcgcggcccgtcagagggacagtctgcgtctcgagtccgccggggaaggacggccacgagggcgagtccgagttgatgttgatcgctggagtggaaagagtcaagccgtcagccgccgatgctgcaagagagacgtcgaaaagacaagcaggaacccgacgcacaaggcttgccagcgatcccaccctcctcggtgaagccaaacttgccggcgtacgacccagccgtcggcgcgccgccgttcgcagcgggcgagccggtcgacgtaagcgagagcttaccaaggccaaacgtcaggtcgtccttgctcccgccggacggccggcggctcgcaggcatcgacttgaagccgccctggtgaggcgggccgatcggcgcaggcttgtcgccgccgccggaagaggcgccgttggagcccttgccggtcggaggcgacgaaggcgcggtcgcggtcccgttcgggggggcagagtcgcccttggactcgagcagggcagcctcctcgcgctgctgctcttcctcgagggccttcatttgggcctcgaagagcgcacgctgggcggcacgctggcgctcgtgctcgagccgcttctgctcgacgcgctggacagagaggagaggtgtcaggaggtaaagttctgttggattcgtcgctcgagctcccgatgaagagcaaaggacaggaggacatacagcggcgagctcagcctgggtggccttctgcgagccctggagggggacgagagaggaccgcgcaagagcggtcaaggaggttctcaatgagtcagcgctcgtcgagcgcttgcgtcagaagacttgcggagaggccaataggacgcacagagtcggccaggtcgaggaaatcggcggcattgcgaccggcgttggcctcgcccactccggtcggggacgaaggggtcgtggtggtggccatctttcgagggtcagaggggtaggagggggttgcggtggggagtgttgcgggctatcggtgcggcggtgcgtcggtacgtgggtcttccgggtcttggatactgtccgcgatgacgagcggcaagggtgtcagtcttgcatgaccttcgaaggggttgaagagggcggcgaggcgaggttgaggggagaggtgacgccagtacgccgctaggctgaaagcttgccgaacctcgatgcagattcgccctgcaccagacactggcccgcccgagtcttacgacagcgacgtccgtgtaggcgtaaattacggcagcgatgtgacgagagaagatgatggcgcccacgaagcgaggcgagacgagcgcgagagggggagcggtgacgaggcaagccagggctgaagacggacgcaccaggcgaaagaaaggagcgttcttcctttgcgatcctcgcttctagatggcgagcgcgtgttgatacagctggtcggagctgcggtccgggtcgaaaatcgatgcgagagaggcgaggggaggcgacggccaaagcagaacaaaggacagggcagggcggaaaaaaggtcggaggacgcccagtcagcatcttcgaccgttcgacagcagacgacccaggcagctcgtcccgagcgagctccgcctgctgggcagactgaagagggaaggaccgacctgaagggatgttgttgcgagtgtatgctgctgcttcgctggctgttttacagagccagagggaatgggagaaggtgaaagcgtcggtcggtcgaggcgagcgtcggtcggtcgaggcggcgtcgtcttcctctccgccgcccgggaagggccggccgcccaatctccaaaggcggccggcaccgcgtgggacagacgaagaggacccccgcaacgccgtctctcgagcccatcggctcctgtagcatgcgagatcgctctctctctctcgcgagatcctgctgagcgtgcgccagtcgtcccgtcttgtgcgtcgtcgcggtcgacagtcttgcgcgacgtcgctggccacgtcggcggctggccagcatgtccgcgcagtcgcagccagcccggttcaccggttcatctctctctcgagtaacttcgcgtcggtctgcgacactgagggtaccagcgagggcagacccacgccagacatccgaacgtcacgagcaagaattgacatgagggacgaacgaggtcgtccggtcttgctgaccgaccctccctcctcctctccgtcggggcccgaattcctgcgggcggagacggcgagctttggtacccgagctccggcgagtcgtcgacatccatcctgctgacccgcagcatcctcctcacacggcctctacgaccccggcccccactgccgcacgcacacatggccgagatgaagactggcctgcctggcgccggcgccgactctcgcccgctcgacgacgacggccggcgcgctcatttacttgcccgccgcctccgccgcctccagcccgccctcctcctcgttccactgtttctcgccggcccgctcgtcttcagcgcgctcggcgtcgacttcggtctcggtctcgcgccgttctgttcgaagcagagttcggtcggttggccgagccgtctcgtctgcgtcgccagcgcctccagcggcagctcctgccggccgtcccctcacttcgcgagcaatttcgacgactgcgagaaaggcgaccccggtcggtcgctcgaccgctggctccaggtcgagcgagaaatcgcttggcgggggatcgtcgacaacatgtgcgtcctctcatgccgaccttagcgaggctgccgaccaagacacagttgggcgaaacgccacacttccttccgtcaagctgacggacgacaagggctgatcctttccctcttccctttttatcaattccagtggtcctgcggccggggcctcgactggccttgtcatcgcgtcgccctccctcgcacacccagactacttcttcacctggacgcgcgacgctgcgctgacgatgtcgaccgtcctcggccggttcctcccagctgctgacgccggcgagcccgagctcgagcccttgctccgcgaatacgtcgcgtcgcaggcctcgcttcagatcgtgcagacgcgcagtggcgggctatgcgacggcggcctcggcgagccaaagtttaccgtcgagggcgcagcattcgagggggattggggaaggccgcagcgtgtacgtcttgctcgacgagaaacgcagcgcctcctcggtcctccgacccaggctggctaatcgctgagattctcgctcacgccccttgtctggcgcaatcgtaggacggcccggcgctgagggcgctcgtcaccggtcgcttcgccagcttcttactcggtcgggcgcggccgctcgacgaaacttacgtccgagcgaccttgtacgacgctgaccggctgattacccccggtgagttcagctcactcgtctcggcaggagcgtgagagctctgatgccctgctctcctttcacctgcaccagactcggtcctcaagtctgacctcgagtacatcgcccacaactgtcgcgaaccctcgttcgacatttgggaggaagtctctggctcccacttcttcacgctcctcacctcgcgaaccgcgctgcttgagggctcgcggatcgcgcagcggctcggcgacgggggcgcggcgcggttctacgaggagcaggtcgaaaagctcgaccgggcgctcgagccgttttggattccagaggaggggtatatcagcgcgatgagcactccgcgcgctcacggccggactggtgtcgatgcggctgtcttacttgctgtcctacgtgcaggaccgctcgcagcggcgaacgagacgcgctggtcggaggccgacgaccgtgtcctggcgacggtcgagcgctacgtatcttccttcgccggcgatctctatgcgatcaaccggcacaagaacaaggattggcacggggcaatcgccgtcggtcgctatgccgaggacgtctacgatggcgttggcaagtcggccgccaacccgtggttcatcacgactttttccgttggcgagatcctctaccggtcagttcctgctttttttttcgcccagctcaactctgaccttttgccttctggccgacagaatcgccgctcacgcactcacctcgggccgcatcaccatctcgcccgtctcgctcgtcttctggcagacgatcgacggccgtctcagctcgggtcaagtcctcaagcgcgcctctataaaagccaaaatcaagaacggccggtttgagcgggtcgtggacggcttgcttgcgtacgccgacggcttcctccgcgtcggccagacgtttgccgggccgaacgggacgctgagcgagcagtttcatcggtgcgctcctccttgccccctccttgacgtccagagctgactctgccgattccttctgcaggcttgacggctcgccgactggcgcgcagaatcttacttggtcgtacgccagcctgctcgaggctgccgacgcccgtcagagggcgtacgacctgcgcttcttggcctgagacctcaccgcacgacatctgctccttcgcctgaccctgacgacctgctcgaagcccttgccccgaccccgctgccctccactgtgttgtctgtgccctctagccttctctttgccgcctgtctgtcctcctaacgacctcccgccccatcacgatgacctcgagctccgaaacggtcatgcgcgagaattacgccgacagccggccgatctcggcgcccagcttcgccagccgctcctcggccggaaagcgccgggcgagctcgccgacgtgcgtcttgccctgggccacctttccgacttggagcgagcccgagacgcgcgtcgaggcgacctgcgcggcggcaagtggaacacaattagcctgggagcggctgccagatcaaggccgagggtacgcacgaggttgccaaaggcggcaccgaggcggaaggcggcctcgccgtcgaccgactccagcgtgacgagctgccaggcgtgatgagacggttgattcggcgtgtcagcagagagcaacctttgcgattcgggcgcgtctcttcaggactgaccttgagcacaatctcgagcaggccaggcgcgacgctcggacgcgggaagcccgacctgaccgcaatgaccgagtagctgcgtgggggagggagagttagccaaggtagctcggacgcccacgctggagggcacgtacttgaggaggaccgtcgccagggcaacacggatgttcttgttaaactgatcgtacggcgcgaccgcaaaacaggcaaagagctggcaaagcggcgcagcgatcagcgttcagcgtcgcggatatttgagcttgggcagccaggcgggctcaccgtctcggcagcttcaaccatcgcgagcttaccgttcttcgtgccaaagacgttggcgagcgcgcgcagggcgagcatcgtgttggtctcccgctcctttgtcggcgtccaggctgagcgccagtcgcaagcgacgagcaggagctcgacgaccgacgacggtggcgaccttggtcggtgcgatgcgagcgagggcgatacgggggctaggaggcggacgaggtcgatgactggtaggggccgggaacgcacgaggggtcagcccgaggttcttctgttcgcgttacttcggaggacgcacgcgggaagcgctgagcggccggccaccggggcacgacggcaaagagcgatggcacatcccagccctccttggcgatcgtgttctcagggttgggaagagcgccctttggcagcgaaaggaatgcagcaatgtccttgacgttgcgcgtctcctcggccgtcatcgcgacaccggcatccggcccagagcgcagcgaggcgtcgaactccaacagcttcttgctgagcgcctcgacgttggcttggcggaaggtcagcggcgccgagacgggcagaatgtcgtcaggtcgccggctggccgccgcgcttgattcgccacctcctccgacggctgacggagccccgccggtgtagcgagctgttccgctgtacgggtcgacgtagccgacgccggtcgccgccatcgggaccgagttgctgttggactggtagcgcgacgcgcccgtgtaggggtcgacatactggctcgcggccgcgtcctgcccaattgtctgtttcgccgaattggtctcgatgaattggacgacctggtcgatgtacgagagcgggagctcgttccgctggaggaagtcctgcgccgcggtgaaagggttatctgagtcgcgggatgaggcagcgggtcaaggtctgtcgctcgagctcgacgagcttgaagaagcgcaagcaggacgagcttgaagaagcgcaagcaggacgaaccactggcgttgtacggcagcttgagggcgggctggccctcggcaatgtcgacgtcaaagacgtagtcgtactcgaccccgttgaacagctgcttgcggcccgagccaacggcgtcgacgacctcgccgatcttttgccacgacttggaagcggacgaccactgccaggtgggagcgacgtgtcaaagaaacagtcagcatctgcttggaatgcgtagcgggtcgggccacgcacctggtgcgcctcgacgacgtttatctcattcttgaccatcagcacctcgccctccttcttgccgtcgcggccgagcgcctcgataccgggcacgttctccttcttgacgtcgccgatctggttagcgctgtcgagcgggagaagaaggcgtgaagtgtcagcgcgacagaaagcatcgctcaagtcgtcacgtgaacgcacacgtcgacctgctgcttgctgacggcctcctcgtacgacttgacgtcggcggcggaagctacgcgctcggcatgccgcgtccagacgcgcacgacgccgtcactcgagcccgtcgcgagctctccatcagccgtcgcagcgacagtccagaccgagacggccggatgcgggatcgtctgcacgtttttgccggtctccgaccagatccgcagcgtccggtcctcggacacgctcgcaagctcgggctcgccgtctggcgtcgtcggagggaggacagtgagcccgtagacgaaggacgagtgaccgtagaggtcgatgatgcgctcgccgctgagcgaccagatgataatggtcctacaagggagatgatacggtcagcggtcgtctcaggctactgcgctgtgggcgggagctcacccgtcgttacccgagctcgcaaaggtgtcgccgccggggatcttgacgatgcaacggacggcgtcggtgtggccgatgaactgagataggacagagaatgagctgcctggacataggccaccgtctgcagccgctgtcgcgcacctttcgcgtctgcgcccattggtcgccatttttggtccagaggacgatcgtcttgtcggccgagcccgtcaggatctgcgtcggcgagatggccttgatggcccagacggtctgctcgtgacccttcagcacctgagcctgctcgaacgaggagctccagacgattgccgtcctgcagaagagccgagcgcgtcagcaagcggctctgcgccgagagacgaccgcgcagcggtgccgcctgcggaggacgcacttgtcccacgagccggagactggagaggagagggcgcataaaggtcagcgagaatcttggtagcgctctcggtgcggcagacgcaccgatgccagagccatcagagaggccgtcgaggcagcagacgttggccgagtggccgatcgccgttcgggctggatcgtccgaggcggccgcctggagctcgctcgacgacgttgcgccctcgggaaccgcgtaggcgttgattagtgcgtcctgcgagccagtcacgacgtagtctgaagcgcggccgggatgacagtcagcggctgattgagggcagcgacgagagacgactggacgcactcgtgccgccgatgacgcccgcccaagcggcgccgacgaagccaccgaggccctcccagcgcttgccgagcgtccagccgtcggcgccgcggacccaggcgatggccgacttgtctcttgaggacgagacgatcagagaggctgacggagagaagacggagcggacctgcgagagcgccgtcaggcaaaggttgacgcgaggagaggtcagcccatcgcgcctcgagctaaaccgagctcgcttgccggcagactcgggacgcacgtcggcctcatgcgtactgagctggaccgagagctggaaaggctggaagggaggcattgcgacgagagagagagaaaagaaagggagggttggagtgtcgtgccaggtgagagctgggcgaagccatctcgcacgccggtcgacgctgcccggcgcggtggaggtggccagaaaaatctaaaacgcccgcccctttgttcagcctcctgtcgcccctcgtccctcccctctacagctcacttagtgggcagcacttctgacctctcgacgtatgtgaatgcacccccagcatccgcgagcccacaagtcaaccgcagcatgtgatcagagcgtcgcgactggcccctgcgccgtgccatccgcctgctcgcgctccttgctcgtgtttccctggccgacgaaagcgcgagcgataagtgtaccccttcgcgagcggtgcggcttggacgccttctcggacggggctgccgacttggcgccagagccagctccgataccccagaagaagccgcgatctgaagaggcgcgcggcgtccggtcgccagcatcgtcgtcacccgcctcgccatcggcgccggccgcctccgattctgactctgtctcgagctcaaagcggccggccgtgggtgagcccgcagatgagccacgcgtctcagcggcttctgtctcggccgagtcgagacagccggaggagtgcagtgttgctggccgcggtaggtcgcggctggacgttggcctgaaaggagtaagacggctttaatcagcggcgggaaaggaacatcaacaggagagctcaggcagcggagactcacatcggccggtcggaggagacggtgaggaggagattcattaggttgggcagcgtgtgccgcaggtccatgatgcgcaggccgcggccgaccatcagctgccgagcaagcagcgggaggagagctggtcaggaccatgcccgggcaggtcaaagtaggcgagaagcgcgacgtaccagctcgagattcttgttgagcaagaagacagcatattcgaagcgatagcgctcgatgcccttcgagtagagcgggaacagccgggtcggaccggtgatctcagagattgggtccttaacgagcgaccggctgccggcgcaggtgaacgggtacggcagtcgcgtgccaaggtaattggcaagccggtcgacgagcaatgcgacaaaaccgagcgcagacgcaacgctctcttcgtcaacggtgataccgggcgaaaggtgcgagcttggcagcgtaagtggcggtgcgggctctttggggtgcgagggcagtggcagggcgacagagacgatcgtaaagatgggttgcgctcggccattcgcgaccgggacgatcggaaagatggcctcgaggttgcgagcaagagcgccctgcgcagcccgaaggtgggcctgggcgtcgctccggtgagatctgcagcgggaagtgtgaccgtcagccctgtgctcgtcccagccaatcagcagcaacgcactccactcgctggattgcgccctcgagctccccttgtgcagcttgctcgtcgcgcaacatgtcgcggccggcttctagctgctgcttccttcgcttgacgtcctcctgaaggcgggcgatcgtggctcgagctgcggagcgagtcaaaggtcagacagaggtcgcgcggtcgagcattcgtttcgaggacgcactctcgttggtctgagctttgacgagctcttgctctctgtcgatgcctcgcgtctgcgcctcaacctgaagcgtttgtcgtcgctgagtgcggaaacgcggtcaggatcggctacaaggcgcttcccagcgaccgcgaggcgtaccagatgatccgtccgatcgaaatctcgcatgagcgcgtcgacctcggctcggaaggttcgaagcgacgtgcgagcggcctcgagctccgtctgcgtccgcaagagtctggcagtcggcagcagtggaggttagcgaccggcaacaacctccaagcttccgttttagacgcacctctgcaggtcttcggcgctgacgccggccttcatccgcgtctcgcgcaggcttcgcaagatagcctcctcggctccgctccactcgataaccttctggcgaccggccgccttgtgcagctcgggctccgacgccacgcgctcgagccggtgcaggcccgccgtcgaggccatgggaggcgggacgtagaagacggctgccggatcatcgaggaagcggaccgtgagcgtgttcgggggcagaaaggttctgccgtcccagcgcttgaggtcgttgagcggaacctcccactccttgagcaacgaccacccggcttctggcgatgactcggacgccgacccgcgcttgcggacccatagctcgacgccgatggtgtcctcgcgcgttgcgcccgactctcgcgcccagggcgtaaaatcggacccgtctgttgccagctcggggaagcgcgggttcgtcgctgctcggtgcgaatgtgagatgtagaatggcgtcgcgtgcgggttgagtgtcggcaattcagggcgaccggccgtcgtcgccgccggggatggtattgtcaggaggtcgagcttcggtctcggagttggcgaggaggacgggcaggttgagatggacgtctgtcgagacgtcgagcgtgacggtgaggtcgagcttgtcgagagagtctcgccggaggaggccgcggacgacgacgactcggcctgatgctcagctcgaaggacgagctcgcgatacttgcccttgcgctccgcctcctctgaccgccctcggtcggcctcgatcgcttccggcgacgcagaaggcccagcttcggccgactgccgagcgagaagcccggatgcccgggcgttgctcagtcggagggtgatgaagctctcgagcagccgctcgcccgcatcacggagagcgcgctcccgctcttcttcgagcatgaagtagccctctcccgaggcgggagacggccgcggcggaaggcccagcacggacgtgggctcctcttggccttcggcgatcgcctctgcctcgttgacaaagcctcgtccggcaagatcgccagcggcggacatgggacgcgtgacgctccgagatcggatgcgagtgatcgttggcgaaagcgtcggagagattgaccgcagctcgtcgtgcaggccttgagggcttccgctcgacgaggggcggccgtgccacgagaggcgggacgatgcccgcgcgcgagagagcgatggccggcgcggaacggctgatgccgaggaggatgttgagggcaaggcgccgaaggatgatgaggacggcaggcggggcgacgtctgggtcgagggtgacgagggtgggacaaggagcgactgcgagcgaaggcagggagagagagagagaggggtggtcagcctcgaaagcggtggcagctgcggctgcgagttgctcggacctgtgcactgcttgtgctcgccccgcgtcgtcttcccttgccgacgaggtcgagatcgtcgagcgagcgttgccgaaatgaggcgcgctcgtcctggctctggccacctccgccggcggtcgctgcgccgccgtcttggctcgaccgatgctcctgccagccgagcgagccggcggcggccgcctgaaggacctcatccttgtgcggcgtggccgtcaggctgtggacgccaaagttgaggacgtgtcggagccggcgctgcatgggggatccgagccgtcagcccatgcgagcgagcgaggtgtcgagggaagctcgagcggaggtcgacgcacgcggacgaccagtgcctcagtcgacgaaggctggtgcgacggccgcgcgttgtttgggattgccatgggagctaaggaagggttgagcagggccggacagctaggtgatcatgctatgggccgccgtccggtgtgttgcgagggacagagagagagatggtcatcgagggtcgcagcagggcgaggcgggtgagggaggtttgggttcgttcgagccgatcggggctctgccgacccatcttgggcgtcaagaaaggggccttcgcgggcaggccccgcttgctggcttgctcggtcgcctcccccttgacgtcgacctctagcccgctcgccgaccaacgactcgacaagcacggatgctcgcactgctcgaggccgcctctgaccgactgaataccgtctctcgtggaccgctgctcgtcgccgccgccgctgtctttctcgtcgctgcgatggcctccatccgcagccgggccgagccgtacacctttgaccacgtcatattgtctttttacttgttcaataaagcggagctaggactaacgtcctacactttcgtatcaaggtcgagcttaaccgccgcgagggcgagagcggccggcccaagaccgaatggatgaatatgtgcgtcgatacgcaggctcgctggcccttcgcgcgagctgactatcgcttggcggccgtctcgacctgcgcctctaaggggctactggcgcgagaccgacgtctttccgaacgcctgccagggtgagtaacagttcagcttctgcttccttaagtctccactggactgaagcgtttgtatcgccagcactcgcccgcaaggtcctcgacgcggcccatctacgtgaaggcggccaccatctcgatgtcgcgcacggctccggcgactcgctcgtgctcgtgctcgacaatatcggcccgacaagctatccgttgcaagcttccgtcaccggcgtgacctctatggcggctcattcccggcgcgcgcaggatcgtgttgcgacgactggcgacgacgcggcgaaggtccagctcgtctgcgacgacgcgatctttcggccagagtctgcgaccggcgactcgcacccctttgcaccagccagcaaaagtcgctacacgagcatcacctgtctcgacgccgcctatcacttcgtgacccggcacaccttcctcagccaggcgttcgaggcccttgctcccggcgggaccctagccctcggcgacaacctctcgtcagcctcgtacccgacctcggcaccgacatcttggtcgctcactcgcgccggacgtcagccgtctgagccctctctgacggctcgactccttctgccgtggcttctgcccctcctttccgtcccggcgtgcaacatcgtccccctgcccgagctcgcgcagcagctgctcgacctcggcttcgaggacgtcacgatcgaggatgtcagcgacgacgtctggccgggctttgccgcctttctccgcaagagaggaccgttctggcgggctgccggctggacgatcaattggctcggtggcagcggcggccttcgctgggtcatcgttcgggcgaggagaccggtcgaagggtgaggcgtgcgccttccgatcgacatgcgcctgatccacctggagcaacgctcgcggctggggacagaatatcagcagggttgtcgtcccctgctcttgtgcgactcttgctttgccttggggttcgatgccaacaaacggcccgagcggtctctcatagagcagacggacgcgtcagcgctgcgcgagcccgaccagacgagcagtcgatgctgccggcctttgccttctgttctccaccatcgaccttctcttcgcgacccttctgcctgctctctcgtttacacattctctgggacggtccagcgctcgtcacctcgctcgctcgtgttccgtcggatgagctcgtgatcggcctaggctcccacctccctccgagctcggaccgccctccaccgccgcgcttcttcttggccgaccctcgatggctcctctgcccaaggccgtgacgctcctcggcggtgggctgacgtcgctcgcattcgcctaccggctctcgacgctctcgccagcaacgcagattacgctgctcgaggcctcgccccggctcggcggctggctatcgaccgtctcgctccctctaccgaatgacgccggtgccgtccagatcgaggagggtccccggagcgtccgacccaagggacgaggtgcgccccggctgctcgggatggtccaggagctcggcctcgcggacaacgtcgtgaccgtcgggaaggatcatccgagcgcgaagaaccgcttcctgcttcatccgacgccggacacgctgcttaagctgccgtcgtctccgatgtcgctcctcggaacgagcatcggccgggcgctcgccgtcgccgctctcaaggagcccttccagccgcagtcgaccgagtcggacgagagcgtcgatgccttctttcgtcgacgcttcggccccgtcatcgccgactcggtcgcgagcgcgatggttcacggcatctacgcctgttcgaccaaggatctctcggtccggtcggcgttcccttacctcttcaatgccgagcgtacccgtgggtctgtcattaaggccctcatgctcggcctgccaaaatctgaggccgagacgaaggaggccgcgctcgaccaggctcgctgggacgccctcggcgagtggggcaaggcgctcaagtcgcagagcgtctgggggctcaggggcggtctcggcaagctgacagccgctctccaagagacgctgcgtgcccgcggggtcgatatccgactcggcgaggccgtcaaagggttggagctgtccttggaaggcgtccaggtgcgtcagccggctgctgatcgcccgggtgccaagagcgcagggctgacatcgggagctctgtcctcctctacaggtcacgacgaccaagtcgacgttctcgacgccgacggtcgtctcgactctagctccgcacgcgctcgccagcctgctgccggccggccatgcgctcccgcacttgaacgccaacccgctcacgacggtctcagtcttgacatttgtcttcccgacgacgcccggcgcaccagagttccacccagctggctttggctacctcatcccgcggagcacgacgcctaacgacctcggcgtcctgggcgtcgtctttgactcgacggctatgggcgccgccgacacgcccgaggtccaggccggcgtagtcaagctgacgatgatgatcggcggcccatactatacgtcggggatgatcaccgtccccgccgacgcgcggtcgctcatcccggacgcccttgcccacctacggaggacgctgcccgacctgccaaagacgctcgagccacttgtcgtctacgcccaaacgcacagcaactgcatcccgacctatacgcccggtcacggctcgcgcatgcgtgatatccacgagtcattggccaacggggactggcagggtcggctggccgtcgctggtgctggctggggcggtgtcagtcttggagactgcactgagaacggcgcgagcctcgccgagctgcttctccgcgggcaggacagccctgtcactggccttgagcgctggcaggtctgggagtacgtcccctcgcgtgacccccctgccctcggccgacctgcagctgacccacataactctctcgccgcgcagcgcttacaccgcccgggctcagccgacatcattgccgatcgacctgccgcaggtccgccccttctcaacgtctgcccggcctacagtatcccggaccctgcttcccttcggtccgttgcgaacgcttcgatcttcccgccctggacaccgcacctacgccatctcctcgccgtcaacccctcgccctcaagcgcccctggctgttcgggcggctgcctctgcgctcggcttcatcctccgtgcgtcttgatgccgctttctgccagtgacgagcttcctctgactcttgcctgtcgaccagtgctctacctcatctggtttggcatcgtcattgtcgcaaacggcccttacattctcaaagagatttacggcgcgatgaagggcaacgaagtcaaggagtggaagcaggccgagggcgagaaggagatcacgctcgacgacgtcaagggcatgcgcgaggtcaaagaggtgcgtataggtctcgcaagggctgttgagtatcgtctgtctgctgaccctggtcgcctcgcaggagatgcgggagttcatcgagtttctcaagaaccccgacatgtttgcctcgctcggcggccggccgaccaagggcgtcctcctgagcggtccacccggcaccggcaagacgatgctcgctcgggccatcgcaggcgaggccggcgtccctttcttctatgcctcgggctccgaatttgaggacacgtatgtcggcgtcggcgcgatgcggatccggcagatgtttacgctcgccaaggagcgcgcgccgagcatcatcttcatcgatgagctcgactcgatcggctccaagcggtccgataacgacggagagaatggggtgcgttcagcgtgcacgagtgtcgcgcaaaagggagggagactgatctttcaatcaactcacagggaccgacggcctcgggtggcggcggtgcagacgcgtcgaaacgccagaccctcaacgagcttctggctcagctcgacggcttttcgtctgacgaagacgtcgtggttgtcgcgtgcgtgcctcggtaggaaattcgatctttgtcgcgccctagctgacattgatctctgactgttcagggcgaccaacttccccgaatcgctcgacgatgcgctcattcggcccggccgctttgaccgtcatgtccacgtccctctgcctggtgggtacctccctttctgcgttagcctgggaagccgaaactgatatgtcttcactcccggctgcagacgtccagggccggctcgaaatcctcaagcactacgccgcccggctcgtcgttgacccaaagctcgacctgaagctcattgcacgaggcacgcccggcctctcgggtgccgacctcgagaaccttgccaacctagcggcgatccgggcgagcaaggaaggcgacacggccgtccgactgagccacatggattgggcgcgggaccggctgctgatgggcgccgagcgaaggagtcggttcgtcagcgaggagagtctaaagctcagcgcctacatcgaagccggcagggcgttgatcgccaacctgaccgacgggagcgttccgctccacaaggtgtcagtgcccgttgctgcctgctgagcagcagtactcgcgagctgatcactccttcctccacatgcaggtcgctaatgccgcgcgggtcgaagctctcggtgacgacacaggtgcccggcatggaccaggattcgatcagccgcaaggagtacattgcgcgtagtacgtttccgctggccctgcgactcgttctggtcctccaggactgacccttgtcaactgtcacagttgacgtcgccgtcgccggtcggatagccgaagagctcctcaacggtactgaccgcctctcggatcgcacggctgaggacctcgacagagcgtccaagatagccaacgcgatggtccgggtccgtcccttcttgtcgtcggcgcgcaaggccttcgtcgcccgggactgacgtggcgtcggtctgattcccgcaggagatgggcttctcggacaaggtcggcctcgtcagcatcaatcgtgaccagatgccttggctgtcaaaggccaagaagagcgagatcgagttggaaacgcagcggtctgtccgatcgccccttctgcgcgctcgctcgagcactgacgtcgacgaccgacccctgcagactcgtcgaagagtcggcgcgccgatcgcgcgagctcatgctcgcccatcgggccgacctcgaccggctcgcggccgcgctcgtcgagcacgagacgctctcggccgttgagatcaaagctgtcctccaaggaaaggcgatccacccggcgccgccgaggaggaaggacgccaaggtcaagccgccggccgagctgagcaaggcgccgtcgaagccggcagccggcgcgacttctgcaaagccggttcaatggctaagggaggaggtaacgaccggctgagctcagcagcggctacctcccagctgcggctactcgcagacggcacgtgcgctccctgtcgggcgggccggccacgctggccacgcactcgcgcgaaccatcgaccgttccacgtccagcgtcagcccgcgtcgccacctgtcagtcggcgccgcagggcctcccggcataagatgagcagccttatcttatgccgttccgtcttcctgaaaatgcgggagagacagcgagcatgccatcgcaattggcggcacgtcacgcgacgcggcggcaacaggctacacacgcggcgaccaacgtgctggctctcgcgagcgcgtgtaagattgggtcggcctgcaagccgcgaaggcgagtatctgacgctgagctacacgtatccgcgttcttgctgcactttcaggcaagtgtcagttgggaggtcgagcaggctcggaggtgctacgaggtgtgggctaactgacctggcgacgaattgacagcgagcgttctctgcgacgcaaggcaacctgtgtctcgattcgggagccggagctgaagaactgcttgccgaggtcctagtctggaactccgtctacttgccagcagcccagagctcaaacagctcagcgtcatcctcgcgcttgaaggtcgttgtcaggttcgggtcggcccggaggactacggatggttgctgctgctgctgatctcgctgagacgagccgagcgagactgtgatcggcttgaagacgctcgcagctgcaggacagaggcgggctctaaagtcagcctacagacaggcaggaagaagctaggtggcgagatcggacgcacccgagctcgtccgaggccctggcgggagggccagcgaccggcggagggtcgcctgcgccgcgggtcgctcgctttcgtcggcctgactcggcggcggagtcgtgttccgggcggtcgacgaggccgaggacgagcgttggcgggctgagttgggcatgctgctgcctgaggcggtcgggcttgattcgtgggaggtcgtgcaggtcggaggggcgacgactggcttcaacgagtcgcgcgtagacagcgtctggagcgaatgccctcgttcaccggcattgtccctccccttcgattggctggcacgttagaagggagaccgagcggcagaaacctccgctgtgactcttcagcttgtctcatgcatgtgaagctcgagttttgaggggttacagggctgtccttgcgactcggccggacgatctgcccgcgagctgcgccgaacctccgacttcgcctcgcgacgcgcgccctgctcctcttgaccgtcactccctcaacgccttcccatctcttccgacgcctctttcacttctctctagcccatcatgcctgccaacgagctcgacggaggcgacattgttgcaccctcagctgtcgaggacaccccgaccgtcactggtgcgtgtgcgcccatagcgctgatccggcaagcgctgtgctgatcctccgccatctcttcgctctccgtcgcgtccttcctcttgcagccagcaagcgcaatgccgaggaagacgtcgtaaaagacgagtccaagaagtgcgtctcactcttaatggacgggccacgtgctggcgtcacctcgggctgaccctctctcgcctcacccggctcacccccaggcctcgcgtcgaggtcggcgcgaccctgactggcgttgacgtcaaggccgaccaggacgcacacaaggacgggtgcgttcaactccgcctgccttcgaaactgatcggagttcgaccgctgactcggctgagcgtgtgtgctgggggctcgacgcagaccttccgccaaagccgacacgatcccggagcccaagtttgagggctcgaccaagcctgtcgccgctgccgacgaggacgaagacgacgaggaggaggatgaggacgaggaggatgaggacgacgcggcggagggtgaggaggccgacgactcggacgatgagatctccgaggacgagcttgccgcgctccaaaaggaggccggcggggcgaacgacgccgacgacgagccgaaggccggctcgagccgccggccgacgcggacgacgcgggccgctgtcgactggaagaaggctgatgccgagctcggcgctttccacggagacgagtagactcggtgcgtctgaccccctttgggcctggagcgcgcgcatcagacgaatgctgactcgtctcgaaccttctcgggcagattccttcccgctccctgcttctcagtcgtgtcttcctgtgctgtatcttatgcggccctgctctatcctgcccgccggtcaacatcttttcccctccccccgtctccaagccgcctgccggatctttgaccgcttggaagggggcgtcgacagcaaccatcacacgatcgccgtcttcccgaacttggcgacgagcgcctcgtcgtcgtctacacccgggcctgccgccgacgcgatgcggccctcaatctcgctccgcacacgcccgacctggatgcgccagagcgcgaagtagcgcttcgccttcccgtcttggtcgcccgttacagcgccttcggccccgctcgccagctccagcccgccctcgacgaggccttcgaccgcgatccgcagctcggaccggtcgatcggcgcatagcacgcggcgacgacgtcgtcggctttttcgaggagcgcggccgagagcgcgaggagcgggtcgagcgcacttgcactaaggctcgtgcttgctgagggtaaaggtgttgctgagatgggtggcgatgaagtcgtagcggggctgaggacggcagagtcggcgtgcgtgtggagcgagatgctgagcttgaggagcgggagggtctgccggcccgaagaaatgtcaggtcagctttcaagctcggcagcttacgcaagcagagagagtgcccaaagaggcgaagggagggggaaggggagaggaaggaaagggatgaaccgccttgatgagctcgcgttcggccgcagttggcttcttgcccgctgcctcgccgaggagcctcgcccagtcgtcctcgctttctgcctcgctcggcgctcccccctcgtcgtcgtcgtcgtcgtcctccgagtccgacgtgtcgtcctctgccatctctcgcgcctcacgctcgccatccctcaacccctcgccgtcgctcgtccagcgcttccggacggcctcgtccgtgctgcgcgagagtgacccggtgctacctgggcgtgccgcgagcgagtcgacgagggcgaagatggtgccgatcttggcgaggtaaggcggctgctgcgctgaggatccggggttggctggcgggggaggagcggccggcgaggcacaatcgacggccaaagggaagaggtcggcgtcctcgaggaaggcccggacaagccctgcgagtccttcgccgagcgcgtccgcccaccaacgccattctctcgctaacgcactgctccccttcggccggtccgtcgcacctcctcccgcgccacctccctcgacctcgcggacgacccacaggaccctcttccactcttcggcgagctcgccgagactcggcaaagccgcatgcgccgtcgctggcttcttgcctagtgcgagcgcgagcgctgtcgaatgcttcttgaggcgcgtcacgagggtgacgagcgacgagtggagggcggcgagcgagggctggtcggtgctgttggagggggtgtcgatcggcgaggagagcgtctggagggtcgattggagggctggtgtgggagatggtaagaggtgggggcagggtagagggagcggaggatcagtcagagctctcgagtcctgatggtaggctcagacgagtgtccggccgggcgagccgtcgagctccttcttcggctcgtccagagtgtcgctgtcgagcgccagggatagctttgattgtaaggagggaaagataggagaaataagcggacgaaccgatgcgaagcgctgaaagatccgacgaaagagagtggcagcagggtcgagggtcaagcgttgcaggcggagccggggcgaggataggcgaggaagggcgaggtgcacgagcacacgtcagcaccctcacctcgctagcgagctcttgcgagcgaagacggaccggcaaggtcggcctgggcgtcgcggaccatgttcgggatgcgtggcggtcagttgcgagggctgtcgtcgagcgagagcgttgtcgtcggcaggccgaaggtccaaatgtcgacggtcggaggtcagacggcagttcccacgcttcgacaccgtcggtcgccgactcccggggtcgtgccttcacgcagcaggtcgcagtaccgtcgaccctgacgagcagcaggcctctgtcgctcgaccgttgcacagtcatgtttgctgcgagagtctcgaggtggataagtggaggcaggccgggctgtggtctctcgccctccactcccgtcacgtcggggggatacgcccgccgtgctgggtgacgcccttgccaaggccagggtcgactgcgggcaatcgagcgtgctcaagaggggccgatgtgcacctccttctccgtcaaccaccacctacacttcctctagcatgctgtcccatccagcaccagcgcactgccgcggcggctggctcctctctctcgtctttacgctcgccctctgcctcagcgtcggcccggccaccgtcaacggtccgtccccttgtctcctgctcgtacgctgccaggggctgacgaacctgagctcctcctccaccacctcctcttgtccaccaccagcccaagcgtctgtccggcaggcacacgttgcccgtcagccgctcgcgttcgacatccttccgcgccccgagccgccgccggccgggagcgttcagcgccggcggtcgctcgcgaagcgcgcggccgtcaagcctgagcaggctgcgcttaagtgggacgacgagtggcgggtcgagctcgtcctccctggcgtcggccaggaggtagacgaagttgtcgtcctccatctggttcgttttcaactttgacaaagcatgttgcccgtgctcgagagctgacgtatctctcgcacgcgcttggccaggcaccgacgcccgacctcctccacccctcggccagcactcgctcctctacctccgacagctcctccccgctcgcccgctcttccaccctcgcctattcaggctacgtcctcccctcttctggctcgctgtccgacctccactggtcgaccgcacacgcttcgctggagtctgacggcccccggcgccgcgcgaccgagaagcccgagggcgctctcggctgggctcgcgtcgtcgtcgaccgggccgacaagggctcgattcagggcgcgtttgtcgtccgcggctcgacgtggcatgtcctcccccaccggacgtttgcgctccacgactcgccgtcgtcgtcggctctccagaagcgctcgacgccgttggagaccgacgcgctcgtcctcttcaaagacgtcgatgtcaagcagccgaccggccccaacggcggctgcgcgctcgagtcgctcccgttcaacgccgaccgccaacacccggtccacgtcgaaggcgcgcgccggacgcgcgtccgcgaacgcggcccatggtgggtcgatgggccggcgtcggcttcgggtctcacggccgacggcctcttcttggaggcagagggcgacgtcaagcttggccgggaggctgacgtcggtcgggttgacaagcggcaggatgccggagggacgctcggctcaaacctcgagtgcgtcccctcgagtcttcgacccgcatcatcgcgagtgctgaccccccttctttggctcgcccgctcagctttgtcgcctcgatcggccagcgcgccggctgcccgacgtcgcagcgcgtcgtctacacgggcgtcgccgccgattgtgcctatgtccggcgctatggcggggcggacgaggctaggcaggcaatcgtacgtctacctttgacggcgaaacttccccaacttgtcggcgcgcgtctgacgtctcctttcctcttcgctcgcccgcctgctccgcagctgagcaactggaacctcgcctcgggcgtcttccgcgacaccttcaacgtttcgctcggcatcgttgagctctacgtcccgaccgcgaccaacgcctcgtgcacatcgacgccgctcgactcgaccgagggctggaacgtcgactgctcaagcctgacgctcaacgaccggctctcggccttctcgcagtggcgtggacggtcggccggctgggagcaggccgggcttggacacctgatgagcggctgcccgaccggccaggaggtcggcgtcgcgtggctcggtctcctgtgcgagcaggacgcaagggatcagggcaggtcgggcatcgttagcgggacggccgtctctacgttctcgccggtcgagtggcaggtggtcacgcacgagacgggtgcgttacctttgcccgacgctctctccctccctttcgattttggactgacgcccgcccgtcctcttcgctcggcgacacaggccacaactttggcgccgttcacgactgtgcctcgcagacatgcgtgagcgcctcaagtggcgacggctcgtgctgccccttgagcgcaagcacgtgcgacgccggcggccagttcatcatgtcgcccgtctcgcaggagggcgaggagcaattctcgccttgctcgctcggaaatgtttgtccctcttccgctcttttcttgcactttacgactagctggcctgacgcctcttgcctccttactcgtttgcaggtatgctcggccttcctccagaacgtcgtcgacacgagctgcctcgcaacgcccggcggcgtgacgaccatttcgacccagcaggtgcgccgcccctcccttgactctctcgcacgagctatgactgaccttccctttaccctggatcaagtgcggcaacggtatcgtcgagccaggagaggactgcgacccgggaggacgcgactcagcttgctgcgacccgcagagtacgtccgctgtcccagaccgcgtctttaagcgccggctgaccctcttgtcttccgattcagcctgccgcttccgcaacggcgccgtctgcgacccggcctcgtcgacttgctgcgaagccggctgcaccttcagcccctcgacgagggtctgccggccttcggtcggcgaatgcgacgtcgcagacatgtgtaccggatcggctgcctcgtgcccagatgacgccactgtcccggacgggacggcctgctctggcgggaccgggagcaacagcaccgggctcgagtgcgcgagtggcatttgctcgagccgcgacttgcagtgcaggaccgtcggacgctcgctcggcatcaccggcgcctgcccggcgagccagagcacgggcgagagctgcacgctcacgtgtaacaatccgaacggcggctttggttgcgtcgtgcgttgcccttcctgtctttccgttggcggccctttgctgaccgtctcgtcccccaacttgcagcgccttcaatcgtccttcatcgacggcacttcatgcggcggcggtcagggtcgctgcaccaacggcagatgctcgtacaacagtgggctcgaccgtgcaaagggtctttacctggacaacctccggatcgccatcccggtgacggtcgtcgtcggcatcatcgtcctcgtcatcctctacttcctcatccgggcgattgcgaggtgttgcggtgccggaggacgccagcgggagcgtcgcgaccggaggagtcggcacggccctgctggcgctatcggtgctcgaggccaaaacccgcagtggtgcgccaccttctcggccgtccatccccagctctcagcgctgacccacctccttcgttgcttcgcaggtccaacggcccgatggcgtcgtccaacaactcgtcgggtgagcccatcgttcagcacccgccgccaggcttcatcccgcacggccaggcgccctatcagccccagtaccagcagcagggccaagggttcggcacgccgccgccgctgccgccgggcaggggccagtgggtcgacccgtcggtctacaacgggcccaactaccggcgctaaggcacatctccgcccgctcgtctcgtctcttgcatgctgtctctcgtttcccctctctcgccgtctgtagccttactgttcaccctcgttacctcacgcctccagccacctcgcgtctgtactccttggtctcttcgcaatctttaccctcccgcatcctcccctcctcggggatcaaaaacaaggctctccttcacgcactcaccctcatctgccgagtgcatgccacttgcaacgaccgacgccctgaatcgtgatgccagcctgtcgccgtaattaggaaggtcatgccatccgcccgccgccgcggctggccgcccgctcgagcatccgccgctccttctcctccgtctcaagccggattagctcggcccgcatccagtcggtgtcctgcgcataggcctgctcggttgacggcccgctggcgtcgtcgaagaagaggaggccaacggtcgcaaggaggaagaggacgccgccggcctttagtcggtcgagcgcggtcatcgctaagcgatgcaagggagcaaaggtatcagcttcaagcctttcctgcaagcgagaatgaaggaggggacggaccccagtaccagtcgacgatcgtctgccacgagcccttgtccgctggcgcctcgtgcaggagctcggcctgagccgcctgctcggccgccaggcgcttccgctcgcgttcccgccgaagacgctcgaccgtcgggtgcggccgatcgggctcgtccgtcggccttgcctgccctgccgatgcccttgccgtcgacgacgaggcgggccgagaggtagaggctgcggcccgctttgtccgctcgagctcctcgagcttgagccggcccatccggtcgagcgccttttggcggagagcctgtgcccgagctgcttcctccgctgcgctctgccgcgggtgaaagggctcagaagcaggcttggacgaagacgacgacgacgacgacgaggcgtgtcggctgagcaggatcgcagcggcggagctcgggccggcggaggtcgagggcccgaggcggaggcaggccggggagcgggcgaagaggaacgtccgaggcagcatagttggcgcagattagggagcggaagagctctggggtgggcaaccgagatggatacgagaagaaagtgggcgtcagacggagttcggagagaagccgacggagcgtcggcagatgtcctccgcgcagcatcagacggtgcgacacgagttcgctggtccacttcactcgtcgatgccccgttctcctgtcggctcttggcgagaaagagcgctggtacaggtacatctaatgcgttacaagcaacagttgagcaaatgaagcgacccaagacgtcgtacgcgcctctgcgggcccgaaactcctcacccaacaaacccccttctcgtctacccatcaagaccccggatcggcgagctcgccgacctcttgggaccatattcctcgtcgggtatggcctgttctccgtccttctgaccgctgagcttctccttgaccgacgatcggccagagtcggccgagccgtgccggctgccctgcgtcagaacaacagcgctgtcgccatcgccgtcgttgaccggtgggctgcgttcttcgtaccgaggcgaatttagcttggacagggtcacctttcgagaggaaaagtcgactacagcacttgcgcgacgcggtccaggatcaccaggtcgaccggaacgatccatgctcgtgcaagcaggctcgtccatcgccgacgtcatgacgccgcttgcgccttcctgtttcttcgagatgttggataggagcgcccagcgggtgctgacaaactaggaagagggaacgagtggtgcaaaggtcagacaggcctcgtctgctgtgatccttcggcgagcgggatgacttaccaggacggcattgacggtgcccgagctggcaaggcagctgccggcgaagatgacgagtggcagcggaaccgtctgtcgccggaggttcatgatccgcgtgacctgcgagcgacgtgtggcatcgagcgggggcctcagctgtgggcaagtagcacgcagtgcccgagtgtgaaggcacgcacgctgaccggaagaaagacgagaaggtagagcaaagggtaggcaagcatcttgcggctcgtggtgtggttcatccggctctcgtgcgaccgtgaagggtgcccttcgcccgatgcactcgtcaggcgcgaacgagtccggatgacgccggcgaggctcaggaagatccagatgtctgggcgagccagaggaagagccacgtcagcgatgtgtggcttcagagagaaggagctcgttcggttgagcacgaacagatgatcgtcgagacgaccatgacggtccagatctgatgcgccgggtggaagggtggttagcgcaagggaaacgacgacacgcgacgccggcggctgcgcaccaagtcgtagagcaggatgaagcgccatgcagcgtaagtttcgctgatgtaacaccacttgcccgcgacaccgtagaacgggacgccgttgcgcgcgaccgcgagcgggccgatgcacgccgtcaatgcgctgacggcccagaaaatcgggatcaggacgactgccactttgcggcgtggcggccgcatgggtacgaggacaagaaaggtgtggatcgagagcgcgagcgtcgaaaggccggtcgagaagtcggagagctagcggtcgagagagtggagcagggacttcagtccgatggattctctccactcgtgccatcggccgacgtacctggatcagcacggcctgagcctgacaggccggcgagtcgtagatgcggccttcggccatccagtggaagcccatggcgtaggctgacccgaggataccgtcggcgacgagtgttgagacgaggtagaggccaagcccgcttcgcaggaaacgctgaaggccagagacggcctggtttgactggctccacgagcgataggtcgaatactgcaagcaggtgaggaagtctgcaattcagatgatggactgtactcagaaagggtggtagccagcgagacgcaccgcaaaggacaggagaagggccccaacgcagacgaccgagaggaggccggcgacggccatcccctgccggagccaaagcaagctcccgctcagctgaggatggatcagagggcctcagaatcaaggactccttaccgtgacgccatgcagctggacagaggtagccaacgtctgggacgaggcggtcgagttgaagccggccatctgctggagtcggggttgctgctgctgctgctgctgcgcggtgtcgctgctggcctcaggagtgcaggccagtcgagggaggtgggatcaagggcgactccttcgccgttgactggatgatagcggccgagcctggagaagtgagcgatgtgagtggctgtggttcgagccctctgcaggcgaagggcaataccagggccgagggacaggtgaccctgcgtgcgatctgagccgggcggcggcggcttggagcaaggtcgccttgctgaaggcagcctcgctgaaggccgtatcggaagtacacgactatgtgctcccggacgactttgcctttgctctggtcttcgcggcctacagcctgctcaaggacgcgaacgacaccttctgcgaccgggccgccatcctcgaggacaaggccgacaagctcggggaagaggtcgcccagctcaaggcgatcgtcctcgcgctcgggctcctcaacaagaccgcccccgtcggcgaggagccgtcggccgacactgccagcgccgccctcgcgactggcgccgtcaatgaggagctcgctcttgttatgccggtcgttgtcgagtcgaaaccgaattcgcccgccgacgacgacactgccgccaacaccaccctcgtcgccgctgactttgcttcgacgtcgttgccctcgcgcaaacgcgttcggaccgagttgaactcgtcggccgtcgagaccgcggccgatgagactctggctgatgaaaccgtagccatcgacacccataagcgggcccgcctccttgccgactcgagcagcgaggtcaagcagctcctggcagagaccgagcccgagctcagtcctaatcctgttcgctgacgctccgagcctctgactgacgcctccgactcgcccagacgacgccctaccgcctccgtcagctaccctcgttcgatccgttctcgcttccgcgcttccgtcgactccctgcaagaccttcgcctacgtcgactcgttcgctccgttctcgttgccctgcccgccctgcccgccctgcccgaccttccgccacgccgccaagctcggcaccggacgcggcaacgcccgccattccagtaacgaggcctggtaagcaccaaggactactagacacccctttactctcctcttcgactttggactttgcctcttcttccttgcgcgcctcacttcctttgtttaacgaccctcttgtaatgcccctgcttccggattcgcatgactctccttctcacactcccgtccgccgtcagagagcgagcgagtcagcttgcgtcgacctcttgtggcacagctggccgacctcgtccttgcctccttgaccttgcacccttcgagggccagtgctcgttaacaagctagagagacattcgatgttgccggcccttccatcgagacggccgtgatcggcccgacctgaaggccgcagcctcaaagtgccatccggccgaccttgccggcaagaccaccagcgtctggccccgcgccgacggtccagaggacgagccgtccgtcgacgctgctcgtcgtcaactccaagggcgcaccgttctgaccggcagattctgccccaagttcgcgcatatggacgagcggcgtgaagccagaggcccaacaaagaggttggctgctggttctgaaggacaaggggacgcgcgagtcagctcgtgcactgtaccttccgccgggtcgcgagtctctcgaaagcgcaccatctcgagatacgacgtctgttcaaggtctcgagttcaaaggaccgagcagacctcgaccgaatcgctcgtcccttgtccgggtggttatcagtcccggcgtcagcgtgctcgggcgtctcgtcgagcagcgtccccggcggtcagcaacgggacctggtcagtctgagggacgggagatggactaggtctggatgacccagagatgaccgattaatacgatcagcgactacttggtggctgtgacctcagcgtcgtttttgtgccagataggagacgaagctcgacgtcagcgtctcttcaggctggagggaagcagacagacgtccgggcttttgcgctcgcggcacgggctggagttgagctcgttcctttcacactcgctgccctcgtcctgggacccgcttgtgtgtcctgccaaaattccttgagagggacctgactgagggggtgtgagagagggaggagaaggtaagctgcgctgccggacacccggccttggccggcgtctcgcctccgccatctcggtcggcaaggacgagaagccggccccatcgtccctccgaacgcccatcgccaaactccaccttccttcggtagactccgtacatgctccagagcctgctccggacctcttcaagaactcgcatcaccaagcactctttcgccgccttcgccgcgccatcgcctgccgccgcagccgccatcaccccgagccgattcctcgacagccaacgcaccatgtcgaccttcaagcaggcgagtctcttcgagcgagggtcgtgacaggatcgcaaagctgactctctcatctctcctccgctccttcttcaggagccacacaagtgagcttcagccctcacctcgacccaccctccgggacggcagccccggtcttccccgaggccctctcattacccgacctgaccgacgcctctcttcccttctccttccaaggctccttgtcattcccggtccgatcgaggtgtctgacaagggtgcgtgctcggccactgtgctgcccctacctttgctctcggctgatctcggctgacgaccctcggcgcgcacctgacgacgctccccgacagttctcctcgccaatgcgcacccgtcagtcgcacacacgtcgccagcctttgcgcccgtctttggcgactgtcagtcctattgccactcgcccaaggcaattggcggtcagagctgaccgctgcctttgggtcaccccttcttgcctcgctcacgtcgcccaggcctgcgcatgctccgcaaggtcctctacgcgcccaagggccagccgttcctcgtcgctggaagcggcacgctcggctgggatatggtcgccgccaacctgatcgaaccgggtgaggaggccctcgtgctcaacaggtgcgtcagccgtcgccgcgcctgctcgccgcggacgaccagcttcggcatcgacagaggctgaccaccgggatactccaccgtcgtccttcgtagcggctactttggagactcatttgccgactgcctcgaggcgtatggcgcaaaggtgacgaccgtccgcgcgcccgtcggcggggctgtcacgtgagcgcccaactcctccgctgaggcaccggatgagctggctgacgacctgcaaccctcgttccgagctgctaggaaggctgagcttgaggccgctctcaagggcaagaactacaagctcgtgactttcacgtgcgtctggcaatcgaggccgagctcctcattgcgcccggccataggctgacttgcgttctctgactttcctcaggcacgtcgacacctcaaccggcgtcgtgcgtcgataggaatcctgtgcgctacgaagaactctagctgacatgagagcgcgccctctcagctctccgacgccgagatgattgccgagacggtcaaggccgtcagcccctcgacgctcgtcatcctcgacggcgtctgcgcggtcgcgtccgaggagatccgattcgacgactggtcgatcgacgtcgtcgtcggcgcgacccagaagggcctcggcgtcccacccggactctcggtcacgatggtctcgcccgcggccatggcggtcctcgacaagcggttgtcgccggtcgggacctactacgcctcgtggcggcgctggctgcccatcatgcagagctacgagcagcctccggccgcctactttgcgacgccgccggtccagctcgtctatgcgctccatgcaagcctctcagccatcgtcgacgagaagccctcgcttgaggagcgcttccagatgcaccgcgacgtcagcaagcgcgtcaaggacacggtcgaggcctgggggctcagcctcatcccgctctcgcgcgatgcggctgctaacggcatgtgagtctggcgcctggtctgcttttccagtatcggagcctacgagctgacgccctgtgcgctccaggacggccgtccgcttccccgacggcctcggcgcgaccgatctcctgcccaagctcatggcccgcgatgtcgtcctcgccgccggcctccacaaagatatcaaggcgacttacttccggatcggccacatgggcgcgaccgtgacggacgcctcgaggggcgatgtcgacaaggtgctcgacgcgctcaaggcgagcctcgaagagtgcgggtacgacactgagaaaaagacgctgaagaagacggcttgacaatcaaaactgtagactaggtcggcgcgccggccatcccctccgctcgctattgaactcctccctcttgtatgagctttcgtttgtgtcgaccgagccagcacgtgagtctttgacagtccgcgcaaccttcggcctcggcggcgagggtgggcggcaggcgagcacgactcgcgcagtcattcaagaaccgccctcggcacgtctcaaatcagcgagcttgctgcgaaggccaaaatcagaaaggagacgccatgtgtattggaagtcgcagaaaggcaagcaagcagcagctagggaaacagtggggagtgtggaggagtctgcgttccggaagaggggttcattaggcgagagctggaggcgaggcgagtgcagagggggggtcgtgaagtggaagccgggcgaagcgggggcaggggcgtcttgacgggttgacggtgatggtgcgctagctgagggcgaaaaggatcaaggtcagtgaccggcaggctataagatgaggggcagctcgagcttgacgcacctcatcaccggactacacgtgtgttgtgtgtcctccgccgctgcgacggccgccaccgcacttgccgctgaaggaacagagggagtagacgttagctgatgcaacagagtgagctgtagcgagacctcgagaggacttaccaggtcaggcagctaacgatagccatgagcaccgaagcgacgccgctgacaatcgccttaagaacgttaaccacggcctggaagaaagagttgatggctacaggcggatttgagacgtgtcagccattgagggacgcggtggagaggacgcggtgggatgattgcggtggaaaggcgagagcgagcactcaccggaaccaatgctcgagatgactcctcccattgtggatcgaggtgaggtgggtttgagttgaggggtaggttgaggtgaggtggtggagggtgggctgcgagcaggtggttgttggtggcgagggaaagaacggcctggccggcctcgttcttatacgccctctctcaacaggggcgcgcctcttcccgcagccctaaagtctgcacgacgtcagagcctggtcggtttggctcgcgtcagggtcagaagcctcggcgcgcgctaggctcttggatgcgccgacgtcattccctgcccctttcgtcgcggccagccccgcgcggggacctctcgctcgagagccaattgcggacaaaccatgggaccggccgacgaggccgcacttgcttccgaagaggtacgagcagcagcagcagcagcagcatccaggactagggatgacaaagaagggaagggccgaggtgaaggctgctctgtcgaggcagcaaagcaccaccgcaaagtgccgcaaggttcccgcgccaacgcgccgcgccgcgcctctgcccggccggctgccaactctcatggcttcggcctcaatctaggcgaggcgccagcgtgtgggacagaagatgcgatcgacggtcgcttcctcgcccttccccggtgacgaggagtgagacgggcgagccggccgtcaacaaacgcggacgacgaccgacagcactcggaaggtgacggagctcgagccgcgctgcgttgacacgagccagtgtgtgctcgccactccctcctcgtgcctccacttctaactgcgagcagttctccccgcgaatgccattcatccattaggttgcgaccgaccgcgctccaggtgcgacgaacgggtcctggccctcgtagtaggccggcagcgtcccatccggcgcgtcggcgagacaggcaaggctcgtctgccggacgagctcgaggtacgatggcagccggctcggcgtcgcgctctcggcgagctgaatgaacctggtcgaggcacaggcgcacaagtgggaaagggtcaggaggtgggcgtcggcgaggattggtagctctggcacgcactcgacgtaaagcttgaaacgctcgtcggcgacgacgattggcagctcgagcgccttctgcaggttgctgtggaacagcgggcgatgttctcggtcagcagtggttcccttcgagaatcctcggcgccgcacgcacctcgggatgagctcgctcgtgtcgcacagcaggtggtgcagcctgaagacgagctcaggcacaaagaggtgccgtatccgggcgagctcggcgaggcggcgctcctctgtagggcgcggagcgaggtgcaggtcggtcagcagcagtacaggccctaccctagggcttcctcaggcggacgcacccagcgaagccgattcgtctgagtcaaacttgagccagtcagattgcagcaggtcgacggtcgacgtgtacgaccggtcaacggcggccgcgagccgcttcgtccagtcgagctggtcgatcttgggaccgctgtatgaaggtgataagggcaggaaggaataagcttcctttcaacgctgtgactcggtcaagagcacaagcggggacgcacctctgctttggccgggcagcgccaatctcgagacacttcgtcaggccgccgacgacctcaaacagcatgacgagctggacgtattcgctcgcgtgtgatgcgagctcgccccggttaccggcgtccgaagacgaaaagtcgagcagctggcgcggcagctggacgagaagctcgcgcgcggcgtggatcttgcccgaggctgaagagcgcggggaggtgggtcagcgaggcagcgcgacacggtcaggatggtcggaacgcaccgaggaagtagcgagtgagggcgttggcctggatgagggcctccgagaaggtctcgtcactgacggtgagccactcgagcgcccgaatgagccgccagtcgtcgccgccctcgacgacggtcgtctcgaacgacgtgatatctggctctggctcgtccgatccgggcagcgactgaaaagggagacgaccaattggtcagctgattattgaccggcggacgggtcgcctgcaggacccacaagaaaggtggccgtcatctgcaactgaactgtcagcttggcgacctcgacgagatcgagcccgtgctctttcgcgcgctcgagcgcgaggcggcgctcgcccttgctcgtgttggggtcaaggtctgagcggcggcgaatcagtcagcgcaaacgctttgagctcaaagcgagtgcccaagcgacactcacctcggaggaagcgcgcatagctctcctcgccccgccgctcgccgagcgatccggcatagacggcgacgagctcgcccttgccctcgcgctcgaggacgtcgaggtaagcctgaagaatgtcgcgcgcgggctcggccggtggagtcttgccgacgagcctgaggtagaggacgaggtgcgcaaagaagcggatcaagggcgggtagagtgccgggtcgaccgagttctgcagcgtcgggagcgagtcggcaaactggtacagcaggtcgtccgtcaggtcgagcatgatgtgcatgatggcgatccggtatgggtccttggccttctccctgcagagtcgaagatgcctgggtcagccttgcccgagcattcggcggccaggagacgtacgagactccgtcgcgctcgacggccataacctccttaaagatctcgcgcaaaccggcctcgcggtcctcgctgacgtcgggcacgccaaactcctcggcccagaatccgccgagctcgttcagccggcggtcaaccctgtgtgcgacgagcgggggacgtcagcgaacggccgctcactctttgaagccgaatgaaggcgactcacctcgactcgatgcggcacgtcaatcgggcccacaggtggtcctcccaactccggcagacgggcaagactgccggtaggtagccagtaaggacaccgtacagcgcccgctcgtacagcggaagtcgcgtgttcgtcgccgctgcccggccgatgcgcttccacagcgcccgcgtccggttgccggcctcgacgtcgacattgtcctcggtgagcatctcgtcgtcggccttggcgtctggaatcggtattcggcgaggagagcaccgatcagcgacctttcggcaagatgccgcagcgctggaaggactgacccagcccgccaacccaccagccgccggcgccgccgaggagagctgcgccgcgccagccctggtcgttcgcccggcagagctcggcgcactcctcggcccggccgtgacggaggaggcggaacatggtcggcagaagcgagagcgtatggttctgataccgaagcaggggccagatttagcagcgtcccaagtcgagcagtacgagaggcgggacgtacggcatcctcggccgcgagctcgcccccgccgcggacgccctttggccggttgggcgcgtcaatgtcgaggctctcgacaagcgcggccgaacgagcgcctcccgtcttagcccgcttgagcgccgccttggtcgcgatccagccgccctcacgacgctcgacaacgccatcggtctcgccgacggcgcggtggtcctcgagcagacggacgacggcacgcatctcctcgagctccgggtcggacgacaggatgtgctggatgagcgtcaggggcggcgtgtaaggattctgcgcgagcagcgtctcgggcgccggcagaggagggaggggcgtgatgcgggaggccgagagcgtcgagagcagccgcagggcgagcgactcgagcgagagcgacctaaggaggagcggcgacggcggcgataatgacgacgagggcgactggagcgagctcgagctgagggataacagcagagatcaggcagcacgtcagcctgctgagcaaccgacggcgaccatacgctcggaccaggacgtacacgccctcgacgacgccggcccagcgcgctgcgaggccagactcgtcctcaagcaggcggctgagaagctcctcgccttcctcgccgcggtcgtacgactggaggatcgaggcaaaggcctcgtagacctctcctgggtcgacagctggcaccgtcggagcgggcgacatggtggaaaggaaggaaggggtcgttaagggccagagggcaagctcaagtcgagcgacgagctgctgaggctgaggtcgaatcgcgccgccgacgccaaacacccccctcaccagtacgtgcgacccaagaactctctccacttcgctttcacgccaggctgacgtgctggccgagaagttggtctgatttccatcaagaccttcctacaaaatgcggcgcgggtcatctactgcccgcccgtcgccagccagtcggtccactgagcactcgcccgacgtgcgacggctagcagctcgtgctcgtcggccgacgaggattccgacttcgctcctggaaagaagccttcgtcgattgagcaaaacggcgtgtgtttggagggggctatgccctcgagcaggtagcgcttcatgtggttcgacgtgcagatcgagacagactgcgaagatggggggctaggtcagcatgcagcagcagtgaatgaagagagcaatgggacgtacgccgagcgagcagtgacccggagagtcctggatgattagacgcgacgagttgcccattagccggctgatctcgcgggctgaagtcagcggcgtgatcgggtcggccgtgttgccgacaacaagcatcggtgtgcgcagggttgcgttccagggcccggtgaagcggaagccggccggcgggtccatacgctgcggccagaactcgcactggccgtcaggttcgacgaggctgacgctgccgccaaagtgcgggctgacttcggtcaggacgcggaccatctcgtcagccatccgctcggccgagacgccgtcctcgggcttgacggggggcgagtcggcacaaccgacggcgacgcgcgagagctctgactgccgggaaccggtgtagatgcccgagtgggcatactggtagagcgggagggggtcgtcgtcaaatatcgccttggcgaacagcgaggcgatggccggccatgagcgagggccattggtagactggtagaggcgcgctggtgggaggcatcgtcgagtcagtcccgtaagacgagagccatgacgcgagaggctcacctcgagcgactgaagagtggaggatgccgacgtttccgtcgggagtgatgacgattcggggtgtctcccagaggccgtcaagatagtgctcgagccggtgctcaatctctctaccgtcggcatccttgtcgcttgcgtgggcgagcgcgcacgcatcgggcccggctgccgcacagtcgcggaggaaccagccgtacgtgctctccgttgagttgagccagtcgtagagcatcaggtcgggggcgctgttggcccactgcggcgaggacgcgacgccatcgatgacgacgcggccaaccttagctgagtcgagcatgttgacgaggtaggcgccgaggatcgtgccatacgagaacccgacaaagttgatgagcgcgtccggaccggcctgtgagggtcggcaccggtagagtcagccgccgttggcgccagcaggaagagcctcgggaaggtacgcacaaggaccgcggtcatgcgctcgatgtccttgacgacgctcgtcgtgcccataaagaagagctcctcgccaagcttggcctcgcagagcccaaactcggccgccttgagcgcgcgcatctcgcgcgtctggtcgagaaaggcctcgcgcgaccagcccttggatcctgccggcggaatagagtatccttcgtcgagcagggtatgggccttgaaggcagtgtacgactcgggcgtcgggtaacagttgacggcgggcgtggacgctccgataccacgcgggtcgaagccctgtgtcggacgacggtcgagtgagcggcgagaagaggctgtaagggacctcactactcacaatcacgtcgtaccgcccctcgagcagctcgtcgagcgggaagcggaacgcgagattgacgccgctgcgcgccgagaccagaaatcagccttgctgcatcgacacgctcatgaacatcgcggggagaacgacgtacgagccgccaggtcctccaggattgatccacaggatgccgaggttctcgcttggcttgacacgggcggggatctttgcgagggcgagccggtgcgtgccgcgggctgggtcggcgtagtcggtcgggacgtcaatgaagccgcagaggtagtgttcggtctctcgaccgacgcagggcgcccagtcgacggcagtcgcgttgccgcccggtaaaaggtgcttgacaaattgtggcgagctgacgacgagctgccgggccgacctgatggtgccggcgacgatggcgcagccgaggaggatcgggaccagggcgaggcgcgaccggcggcggcgcgaggttgcagccaaaagccgaccattgggctggccagacgggtcagggaggagtgcagtcttctccgaggacatgctggagcgattgggtagatgggcgatgggaggcagtcagggagcgaggcgaggtctcgcgtgggtcagcctgctcgacggacgaggccgcccgccgtgcgtcgtcgactagctctctcgccacctgccgttgtgaagacatccctcctcgtaccaaggacggacgacggccggtcgtcatctgccctagctgtcagtcagcctggctgagctcgctgggcactcgagctcttgagctggatggagagtcggagcttgcaccggcagggcggagtttgtaattcccgtcgcccgcccgctgaatgaagtgcggcgcgtcggagagaggagagacgcgtcgcgaccttgacgagcgcccaagccctctctctatctcccttctcatcgaccagcttgccatcggcttcaggacctgctccgacccgatccgcactcagactctcagcgcgatctctgcctcgcccacgcatgtcgtcccgcgcggccaagctggccgagctcaaggccgcccgatctggctcatcctcgcgcgcctcgcagtggaaggcgtcggcaaaggaggacgtctacgacaaggtctcggaggccgactacgacgccctcgtccgcaagcgactcgagcaggacgactttatcgaggacgacgacggcggaggctacgccgatgatggccgcgaggactggtcgggcgacgacgagcgccgggcggccgacgacagcgaggacgagcacgagcgcgaggaccggaaaagtacgtcgactgtcttggccttgttccggcctgtacgcgaccctttggctggcgtctgttgctctacgagtagcaggacatgctgagatgagctccatatcgctcgcaccgctgacccctctccgctctgcgcgtcctcccttgcagaggcaaagaaggcaaagaaggccgctgcggcgaagaagcgacctcccccgcgggcactgcctgtcccgacggccgacgcataccggcccaagatttcggccgccaaggaagatgacttcatggcgtcgctcctcggcggcatgacggccgcgccagagaaggcgaagcagccgcggtcactcccttcggcaccgccaatgcgcaagcggcggtccagcccgcctcctgccctcgaccggcgtgacggcaagaaatcgcgtgtctcgtttgtcaaggacgaggagccggacgagggcgcggtcggaatcgacagcctcctccgccgcgggtcggcggcggccgtcaaggacgaggccggcgactttgggatggagatgatgggctcgcccgagtggccggcgagcgagggcgagggcgacgatgtggacaagctcaagctaccagctgccgcgacggcccggaaggccaagggcaaggcggccgccagcgacgacgagtcggatgacgagatgggcgtccaggccaagcggcgcgtcgcagcgcccgcatcggccgcgtcggcaaccaagcgagttaacgcgacctcgatcaaggccaagacggtcgcggtcaaggccctatcggacgacgacgtcgagatggcggagccggcctcgacgacgccggcgtggctctcgctcgccgactcgctcatgcaggcgtcgacgccgccgatgccttcgtcggacgacgtccgctcgtcgccaccgccaccgtcggccgccgctcgcgaaagagaggccgatgggccggcgacgacgagcattgaggcctttatacccccgggcgtcgtagacgacgacgacgacctcgcctcaggcgggacgctccgcatgttctggctcgacttcttcgagcacgagatcaagacggacgacggcccgatcaagcagctctacctgattggcaaggtctgggaccgggccggccggagcggctcacgcgatggcaagccgggcaagtgggtcagctgctgcctcaagatcgacggcctcgagcgcaacctctttgtctgcccgcgcgagcgcacgcagagtacgtgccgagctctgcgtcgtctccgatttccccttgtccgctgacgagcctcccggtcttgcagtcaagggccagcagaccgacatgatccccgaccagcgcgatatctactctgagtttgaccagaagcggcgcgagcacggcgtcggctcgtggatgggcaaatgggttaagcgcaactatgcgtttggcgtcgaaggcatcccgaacggcgagtcagactacctcaaggtcatctacggctttgatcgtgcgttcgagttgctcgatggcctgccttcgccgtgacccgggactgatcagaagacggccctcctcgccccagagccgccgctacctgccaacctgcacggcaacacgtttggccacgtcctgggcaccaacacctcgccctttgagatctttgtcatcaagcgcaagatcatgggcccctgctggctcgagatcaaggagtgccgcgtctcggaccgaggtgtacgtctgctgcgcccgcgaaacctcgctgctggcagaccgatcgactgacgatgagacgtcctcccgcttgcagatgtcgtggtgcaagctcgagtgcatcgtcgatgacccgaagaatgtccggccgatgagctcggacgaggacggcgcaaaggagactccgccgctgacagtcatgtcgatcgcggcccggacgatcgtcaaccataaggagaacacgcgcgaaattgtctgcgcgacggcccgcgtctgggagtcgggtgcgtgcgagaaagagatttcgcagaaagctgaacgagcgctgacgccaccacgtctaccccccttgctgcagccaacattgacgacccgacgccgcccgagaagcagccgagctcgatccacacggtcgtccgcccgctcggcgagtggccggccggcttcacccagcgggccaaaagcgagcgctcaaagattgtcacggccgccaacgaggcaatgctgctctccaactttctcgtcaacatctcgaagcacgacccggatgtcattgtcggccacgacttcctcaatgtttcgggcgaggtcctcctccagcggatgagcaagcacaagacgcgcgactggtccaagctcggccggatcaagcgcaagggcaacgcgccagtcagcaaccgcttcaacggcgtgctcaacaccatgaccggccggctcgtaaacgacctgacgagcgacggtgccaaggtgtgtgggccgcaactaagtgtgcacttacacgagctgaccctttcacgcctgttttctccgctgccgctcctcagacgatgatctcgtcgacgacgtggtcgctgaccgagatgtgccagtcgcagcttaagatctcacgcgaagacatcgacacggacgacacgcataccttctttgacagcatcgtctcgtccccagagcgcttgctccgctttgtccgccactgcgaggtcgacgccttctttcagatggccatcgcggccaaggttcagatcctgccgctgaccaagcagctcaccgtcctgtcgggcaactcatggtgtgtcttgaggacctctgttgacgctcgcctggcaagatcgctgacgctcctgacgctcccaggaatcggacgctcaacggcggacgtgctgagcgcaacgagtacattctcctgcacgagttccaccggctcaagtacatctgccccgacaagtttaccggcaagaacaaggcggccatcctcaaggccgaggccgaggacggcgacggggccgcgacggcgacgaccggcaagcgcgacaagttcaagggcggcctcgtctttgagccgaagcgcggcctctgggacaagtttgtcctcgtcatggacttcaactccctctacccgtcgatcattcaggagtacaacatcgactttacgactgtctcggtcacgactgaggaggatgtgcgtctccactgcagtcgcgccccagagccagctttgttgacgttctgacacgattcttgctccctgcaggccgacggcgacgagaagattcccgaggtcccgcagagcggcgtccagcagggcgtcctcccgcgactcatcgcccagctcgtcggccgccgtcgcgaggtcaagggtctcatgaagggcaaaacctcgcccatgctgatgatgcaggtgcgtcccgccgacagccaggcttccggtctgccgccgctgatcctttgacctcgtgctgcccatcgtagtacgacatccggcagaaagcgctcaagctgacggccaactcgatgtacggttgcctcggcttcgagtactcgcgcttctacgcccggccactcgccgctctgacgacgttcaagggacgtgagatcctgacgagcaccaaagagctcgccgagagcatccagctcgatgtacgtcactcctcgcctccgaccgcttcgggtgtccaacaagggtgctgctgacaagccgcggcgcgtctcgcaggtcgtctacggcgacaccgactcggtctttgtcaactcgaacgtgaccgactacaaggaggcgatggtcattgccaacacgttcaagaagctcgtcaacgacaagtaccgcctgctcgagattgacctcgacggcgtcttccagcgcgtgctcctgctccagaagaagaagtacgccgccctcaaggtcgaggccgatggctccacctcgaccgaaatcaagggtctcgacatgaagcgccgcgaattctgtgccctctccaagacggtctcgcagtacgtcttgcgtggtcctggaccgaaatccagcttcctaccttctgaccgacatcccttttttcctgccgccaggtacgtgctcgagcaggtgctttcgggcgagccgaccgaggtctgcatcgaaaagatccacgactacctgacgaccgtcggcgagaaggtcaaggccggcaaggtcgacgtcgacgacttcatcatcaacaagcggctcggcaagaacccggaagactacccggacgccaagagccagccgcaggtccaggttgcgctccgcatcaaggcccgcggcggcagcgcccgcgtcggcgacgtcatgcagtacgtcttctgcctcgggcccgacggcaagacgtcacgctcggcctcggccgacaaggcctacacggtcgatgagatcaagaaggacccggagctcaagatcggtacgtctgtcggctctctgccgccgatgcccagctcctgaccccttccgccaccccgctgttggcagattacgagcactacctttcgtcgcagatcctccccccgatcgagcgtctgtgcgacacgatcgagggcaccgaccgcgcccggctcgccgagtgccttggtctcaatccggaccgctattcgaccaagacggcgggcgacattgagcgcgacttccagagcttgagctccaaaatcaccgacgaggagcgctttgccgatgcgaccaagctcaacgtccgctgcttccgctgcggctcggcccgcgccttcggcggcatccaggacgacctcgtgagtctggcggctatgctgatgccgtctgtcctccttggctgaccaccttgtcgccctgcagaacgagcatatccagccggccgggtttgcatgcccgacgtgcaaggctagcctggcgaccccgtccgtcatggtccagctggagaatcagatccggcagcacgtctcgcgctactatgacgcaaccatgtcgtgcgacgactcgtcgtgtccgatcggctcaactcgcgcaatgggtgtttaccccaagcgctgcatggcaccgggctgcaagggccaaatgagcctaaacgtgcgtccgactgcggccatctgtcgtttctactctgattgctgacaacttcacccgtcctcgccagtacaccgactcggcgctctacaaccagctgctctattacaagtcgctctttgacggcgaaaaggccgtcgctgcggccaagggcacgcctcgcgaaggtccgtctggccaaagcccgacaggtctgagtgctttgactgacaagccgcctccctcctaaccgcagacgagcttgttgcgctagccggacagaataagcttgtcctcgacgaattggcggccgtcgtgcagaagtacctcgaccggaacggccggggctcggtcgacatggcgagcctcttctcgtggatgaccgcgtcgagcgcgagcgcttgggcggtcgccgctcggcccgcgtgaggccgtcagctcgccccccgtagacattctccctctcatcgtcggaacagccgcccactacgtccgccattcagctcggcatcgcagcttcctctcgcactacctcccgacccttgcttcgccgcccgctcgcaccttcttttacgccccttgacgaccatgacgaccattccaccttccttgctcgttgcaaagcacgcagatgcatgaggattgcgagccagtggcagggcgatgggacgcagtacagattgaaggggcagatcaagaaggcacagaccagagatgagtgcaggcgggcgggatacgtaggaaagagcgatgggaccgcagcgaaaagggaagaagtgtccaaatgagagaaggtggaggagatctagaaggagccgtcggcccgacgctcgaggccgaccagggcctcgtcgttcgcgtcgcgtgcctcggccgcagaccggaagagatcgtcctctggcgccggacggaggcgcgaggtcgaaggcgacggcgacgccgtagcagacgtcgcgcccgatggggtcgagacggtgtaggccgagacgatcgacatgtccgagtaggacggcgtgagcgagagtgggcgaagaccggtcgggactggctcgggctgcggtgctacgggcacgacggtcggtcggtggtagttgtggagatgaggaggggacggcggctggagcgacttgaaggcgctgctgttgggcgacgtgggcgagttccggtgggacgaggtcgagcctgaagctgaagcggggcccatcgtggacgacgcagacgagtgggtcgacggcgacagcggcgacgaggggtctgcgggcgaagcggattccaaagtcaactttgcgcctcgcgagacgagacaggttccagccaggcgtgacgcacagggtcctccgctggcgtcctcctcctcctccgcgacgtgatcgaggtcgtgctggacgatacggagcttgctccgcttgcgctggaagccgggtttgttgcgcggcagccggttgacggcgccaaattggtcgacgacgtggtggcctcctccgccgccgccgccgcggtcgctgttgctgccggacgagacgctgctgtcgccgctctttccgctcttgacgctgtcatcgaggctgacgtcggaccgctcgcggaggagcgccggccgagggggcgagagctcacgcttgccctcgtccgtctcggcgacactcgtccacggcccgcgcttgcgctccgactggaagaagctcaggcccttgccccagagcgagggcgcgctcagctccatcggcggactcgagccgttgcccatgcccttctcgagcgcctggaaggccgcgtcggcgtcggcctcctcgcgcgcccgctggtggcgctgaacgagcttgacgatcgagtaggcggcgaggcccaggaagacaacggagcagacggtcgcaatcgccgcaacgacgtgcgggttctcgatcccgtctggtcggtactttgtcacggcggccgagtcgcccgggatcgaaagcggctggtagccgtacgagatgggcgagcctccatcgtgccagcgccggaggaggtggccggcgcgggccaggagcgcgcgcggcgctgccagagtgtcggctgccgcggagccgatcgcgttgtcggtcgacgagcgggcgtcgagcgagagggctgagagaggcaaggcaggcagcaggtgtcagcaagccgacaacttgaaagaggaggggtcggcaggaggaaggcggaagggcgcacccatgcgagagagggacgcgtttgcgagctactagtgttgatcggcggcggcggcggtcgcgtccaaggtcgagctgctggccgtcgaaagggagaggctcgtccgagagggagagcagggggctcgtgtaggggacggtcctttggccgggaagcggccaaacggtctgggcgagcgaggtttgccaggcaggaagcgggaggggcgaaggtccgggggcgtggtgtgagacgcgctgcttcggctcctgtgaacgagggaaagggtcgagacggggcctggaggagttgaggaggcgggaccgcttcgtgctgttggttgctctaagggcgcctctgtctatagaagaagggagaaaacgagtgtcgtgggtcggtcaggggcgggcgctgtcgagcgaaggcaggcttgttgctcgctcttcctcctgcctgcgcccgcccgcaccggcagccggcagcctgtttggcgacgaccagaactttgaattcgcccagcgccgcagcttctcttccggccagacttcccagcctgcctcgaccgctcaaacgagtaggcagcatgagatcgtgcatgcgactagaacgagaccgagcggcatgtgtcgacgagggggaggagggacgctcggtggaaggcgagctgagcgggctcgctcggctgctgctgcgctgctcgctcgcgggaagccagtcagagactgccgccggcgctccataaccgactccgaagccagtcgaggcaagcaaggctgggggttcagcggtcgaaggcagcagaccgagtggtctgcttgcttgcttgtccgcatccgacagaatgggttcgcaggcgccgccttcggtccggttcgacgtcgagacctactaaggccggcccgctgacggcttggagctctcgagaaggagtgcagcgccacctgacaggggctctcgcaccccgcccctcaactccatccgcgagcgcccgggcacccagccgtcacgcacgtccaccactcagtcccgatctcggtctggccgcaactagtgcaggtccagccggcccgttggaggtgcgccttctggccgacgctgagagccgggcgcgggccgtcgcagatgacacacgagctcgagccgagaacattgtccaacgtgcaggccggacagggccagacgtcgaccggcgccgcaccgtcgaccgaagaggtcgtcggaaagcggctggagacggccggtgctgagggcttgctcgggaccgtcagtcgttgtcgctggatggggtttgggaccgtccgtcgggctgagagatctgcggccgctggcttcagcgcgccagcaggcttagagtcgaaggtatgcccagatgacggcccagcgaccgggagcggcggcggcggcggcggctcgatgatctggatctcgtcgtccgagttgacacctgacgcgcctgctggcgcggcgacgggcgtctctgcgtcgtccccatcgtcgttaatctcgatgacgccgtctcggctggccttcgcggcctccttggcctggtcaacaccgcacgtccggtcgtccttcagtcggcgttcggcggcctgcagcaagacgcaggaagcaagggtcagcgaacgcaggcggaagtctgccggcatgcagccaatactcacctcggccgccagctccctcggactcttacccgcccggttggacaccccgccgccgccgagcgtccgtccaccgcccgacaggagccgctggatacggatccgctcttcggccgccttgatcgccttttccttagcctcgtgcatcgggacgtcgtggctccggccgacgccgatccggacgccatcagagtggaagccgtcgccccgccagcccgaggcggcgagggcgtcgtactcgtcgttcagcttggccagaaacgcgtagaactgggcggcgcaaagggggaagggagggacgtcagccgagatgccaacgtaagaagcgagcagaggcggctaaccttggcatcatgcgggccgtggacgttgtgcgtgagctacagaccgaaagcaggccataaagaaggagggcggccaagtggtcagcgcctgctcgggcattgagggctcgtgcgcagcaggctctcctctgcgaacgcacctcgtgcagcatcgttcccatcacgtcctcgaactcgagaaacgtctcgggcgcgttatgcggccgaaggcggaggaggatcttctgcccgccgttgacgttcagaccgaggaggcctgggttgtcgggcagcatctagaagggagccggagaggggagggcggcggttccacgtcggggcgtcgggcgacgcgtcagcatcgggaggtcgacgatagccaccccgccgggacgacgtacctccgacaagagcgggagagtccagccgtgcttgcgcatgagcggcttgatctgtaatcggcccccgagcgagactggtcagctcgagaggaggtggcggcgggtcgacagatagaagcgagcgcgggccgcacgaaagaggccaccttctcgagcatcgccttggccttgtctgcatgcttgagcttgacgaggtgcgagaacttgaggaccaaggcgttcgtcatgctgcacgatcaaaacggcttgcgctctcgaggtctaggagggctgacggagatggggtgatagtcaggaggtgaaagcacgagcatcgcagcgcggcgaccttcgaggtggagggacgcgcaactcgtcgagcaggcttccgccacctgcccttcagaccctcctcatcctgcttccactgcaggcaacatcggctggtacgacgctgtcgaaagacgtaacaaagccgaaagacgtaacaaagtcgaaagacgtaacaaagtcgaaagacgtaacaaaaagaagacgagatggcaaaaggaagtatgaaagcttcatagccgatttgaacgactgacctcgacattactagtgtcgcgctctaccgctgagctaatgaagccgatgataagtcacttaatgggcaaggtctgtttgtcaacacacgcttgcccgccactccgccctttgttgtgttcgtctgccctctcacccgtactccctcatacgcgagcgaagtcaagcccataatcagagcaccacaggccccctcactcgccgtcgctctcaaaaaactcgccaaggccgtctccctcgttcatcccctcgtctgcgccctccatgacccggccgagcgcccagccagccgggccgctgccgctaccataccgctgcacgggcgccttacccagacttgcggccggcggcgtctcggcgacaaaggcggcgagaggcaggcgacccgccgaggtcggcgtgtctgagatgagcgagcgcccggacagtttgacgggcgtctcgggcacaagcgtttgggatgtgcctcctgcgggccgtgcgttggacgagccggaacctgatgaggagctagatcagtgagcaagggcacgaaaattgactctggcagcggaaaggagacgaaccgaacgactttgggcgctggaggctctctcgtcggccggcagctttgccaaagagcgagcccttctcatcggccgcagtcgcaccgccgacacggctcaccctcgcgccccagaggccgtcgagcttcgtctgctcgcccttcgcgccgccgccagtcgtcgcctctcctactgtagagccggccgacccgccggcagacttgcgtccgacaccagctcctttggtgaaggagacgcttcgccgcatcagcttttcggtctggctctcggctcccgggccgtatgagcctgctctcgcaaaagagtttgagcgcgagctcgtcgagccggctgcgttgccggagcccgtcgccgctgctgatgatgggccgagtgagttggcccggttcgacttgagaccggccggtgggccaagcgaggccgctcgttcgaggatcgtcgctgccgtcgttgtcgaggaggacgacttgcgaccagggcccagaagcccgggtcgagggttggcagtcgtagcggacgtcgacgttgaccgagtcagcgcgccgcgcgaccccgctccagcgtccttggtcgaggacgtccggttgatcgagcccgccggccgtgagcccaaaccgccgttatttccgacggcatcggcggcagcctggacataccggttggcatcgtccggaagctgcttggccttgcccttgcgccgggaggacccagaaggcgcgcctgacgcgccggtcgagcctggtggaggccagacgactggcgttggtggcgttggctgtggccgctgggactcggcctcgggccgcgacggcgtcgccttgatcggtcgaggcttgaccgccgggatctggagcgttgacgcaatgatgtggcagaaaccagggtgcgagaggccaaagttgggctcgacgacgtcgatatagaatgcggcgacccagttggttttgggcttcgaggctgctgcgcctgccgcagatgatgacgggccggcgtgattcttgtccttcccgccgccaccgctgccgtcgccgctgagcgagaggaagtctacgccgagagttgaaagcgcctgccagatcgaaagccggtcggcgtagaccatcaagctctgggcgagatcgataggtgcaggctcgccctctgacgggctggcggctcgtgcggctttccgctcacgcttcttgggcagggcggcggcagacagagccgtcggtggcggagggaggagaaagtggaggatgatctgcatgaggaccctgtgagaggggccgagcagtgcaagagtcagcgctggtcggggggttcgtgcggacattgagacgcactcgcgacgctcgaggccttcgacccacgacttgccggcagccagccagcggtcctcctcggcagtccgccgcgcgttccgagcctcctctaattcgccctcgaccgcctttgccccgacgccgagaccgctcgcaccgagcaggacaccaaagccggcgcggacggcgcgccactcaatctcgtcgatgggcgagcctcgctcgtggacgatggcgggcggccggaccgacatcatggtcgtgagcatgtacggcaagactcgccggtgcttcgtcgtcacctcggcaacggggaggatgagcgacctcggaaggagggcgccatgccggccgagcgtgcggacgaggtcggcgaccggaaaggcggcctcggggaggtagagcgcctggaggtagtcgtcgcgcgccgacgatgccgcatgttgggcccggtcgagctcgtctgcgagctcgaggacgacggcagccgctgcgatggccgagggcggctttggcgacggccagtagcgaccgccgagctggaggacgctctcggcagcgagcgccggctgaggccaagggatcggcggggtcgtgaggagcgtaaacaccggctgttgctgttgctgttgctgctgcagctgctgatcggacggaccggccgtcgggccaaaaggatcgtccatcgcttcaggctggaagagagggctgcgggggtcgatgagaggtcgtcgtctcgtcgacccgtcgctgctgctgctgctcgtcgtcccgtcgcgtcgtcggtagagccgcgccaggctttatctttcgcgacgagcctggcgcttcggagcgtgctgatggtcggtcggcttgcgggtaccagcagacgttgatgcccgatggtcagcaatagtgctgctctgcgtagcatgtcggacacgccaacctgcctgacctggccgagggtcgagggctgtaggtgaccggccggcagcgtcatggcaaggtcggtcgatttaggagcgtcgaccggctcccaaagagccaagcacttcgaggctctcgttgcctgttctctaactatcatcatcagctctctctcacagcgcacacagagcgatgggcgacatgggcaagcagagcagcagcagcagtagcagcagcggagacgacgacccagaggctgttcagcacaccgacggtctcccagacgccgagacgctggccgagctctcgagcgccgtccgcgacagctacggtacgcgccctccgaccttccttgccgaggcttcccatcgcattcctgacccctcgcttcccctctgccccgcagaccacgccatcgctgacgagaagatcttcctctacgagacgtcccacaccacgacggtcgtcgagcaccgtgtcccctgtgcgtccctcgctcgccagcctacgctcaccgcctgctgacccgtctcctctcctcgtctgcttcagaccaaatccatgccctgccctcaatcggcgataagccgccgccgtccaaagatctgcccgacctcgcacagccgcgggacgacgaccctttcaagccgcctttcgtcccggcagagttcatcggctcgctcaccgtcaacgacggctatttcatcttcctcaacaagtttgggtttctgcccatgcagtttatgctcgtgacgaaacagtggaaatcgcaggtcggtcttgcccagcgctcaaactgacggcgcacacgagctgactgggtgcttgccctctcgcagatcggcccgctcgaaccagatgacctcttcacagcttggcggatcgtcgacgcgctccgccagcagggcgaggacgttctctgctttggcaacatcggcaaccggagcggcgcctcgcagccgcaccggcatctgcagttcatccggatccccgagcgcgagggccgtaacggccggccgaccgcccggatcccgatcgaggaggtcatcgaggacctgaccgagatcgagcagtacactggtgcgcccgcctgtctctcttcttgcgttcagcgctgcctgctgacagctctgacacgccttcacacatcgcggacgacagagccccgccagctgccgctgccctaccgccacacctacacgccgattccctctccggcgccgacggcccatatccttcacgccctctacaccgctcatctcgcgctcttgcccgagggcatcacgtcgtacaacatcctgcttacccagcacggcctgcacatcattccgcgcgccgagcgcgatactaccatcccgctgcctcgctcggccaaggcaaaggacgaggccaaggacgacgaagaccacggcgactttaagctctcgaccaacgctctcggctttgccggctggttctttgtcgacccgaggaaggaggacgtcctccgcgactttacgcctacagctgtccttcgcaacgccggcgtcgccatcgactagaggcccctttgcatagacacacacgctgcacacagactcacggactcgcacaaataaatgacacacgcacgcaggccctcctctgcagacgtttgaaggaggcatgagatgggcgctcagatcgcgatgccgactgtaggcttcgcagccccgacgctgctcttcctccctccagcccgactgccgacgctccctgccttgctcctccggtcctcgtgcgagacgctcgtccggcctccagggtcggaagctggggtcgagaggtcaacgacgctgacgtctcgatagttgcggaacgggtcgggcgacggtggcatgccctgggtcgaaaagacggccgtcggcggttgcgaaggcgcgggtggcagcggatccggcggatctgcgacgacaggttctgtcgtgcaggtgtcggccgaggtctgatgctcgctagagctggtcgatcgagacgagtagcgggcgtctgtgagaggagcagttgatcggctttgcgcgcgctgccgcatgacaggctgccagtggtcgcttggcaggccggcttcctcgacaactgtcgagcgttcgcgctggcggcgctgccgacgtagccagacgatggtgaagacgaccaggacgcagaggagaatgccggcaccgagaccgccaacgagtgcgccgatggctctgcgccgaccggtgatcgaggtaacatgagtgcctgcttgaaaagctgatcgcagatcctgacgccgctcacctggagtcgagcccggtagcggcggaggtcgagctcgtgctttccgcagccgaagcggttaaagcgagcaagaggtgcgagacggttggctcgccgacgccagcgccggggagctctgatggcaagctgctcgctctgcttaaggcggcgagaggtgtcgaggtcagatgcgtccaggagggagtccaagagctggactcacaccttccgagagagtcttgtgctcgagctgctcattgctctggatgaaaggggatccgcttagaggccggctcaggcggcaaagcgagggagaggaacgagtgggtcggaggcctgccaccgaggagccgagctgaggaaagggtagttctgggccggccagcagctgagtgtcgggaggagacgaggggggagacgtcctgctctcggtggcttgcggcggtgaggagggccgagcgtcgacccgccaccccttccctttgtgctgtcggcgaaaagggcgactgcgctggcgaggcaaagaaaaggggcctcgttttatcctccctcaagcgccagtcgcccgccacgcaatcttcgccgccgctcctctcttcagacaagccgaggcatacatattcaggcccagcgacgccctagccacctccagcgcaggtcgagcccgaaaccgatcgcgacgacgggcaagacgctgacaagttcgccgaggcctgcccactgcggctcgatccgaaagcggacaaaggcgcctgaggcgagcaggatcgcgaacacaaagtaaacggagcaccacgcgagggaggcgaagatatgctgcctggcacatgtggccaggtcgagggcgccaacgacactccgctgcaggtccgagccgacaatgacggccgacgaggcggcgacggcaacgtccgaagctgagccgatcgagaacgacagatcggcctgggcgagcgcaggcccatcgttgccgccgtcgcccacgtacgcgaccttacggccgccttgttggagcccaacgaggaagtttgccttgtcctctggggagcaggccgaccggacgtcgtcgagggggaggttgatcgaccgggcgaagcgttcgacggcaccggcatgatcgcctgagagaaggacgacgcgcttgccgcgggctgtcagatcggcgacgagaccagccgcttccggccgagcgacgtcggcgaggccaaaggcggcgagaagctctccaccgagggtgaccgtgaagagcgtcagccctcgctcgctcaggtgttggacatggctagcttctgccgcgcccgtaaaccgtgcgttgccgcccaggaacgggtagccggcgaccacgcccttgactccggaccctggaagcgacacgaagccgaccgtggccaacgggttgggatcggcttgcgtgcagagcccggctacatgcacggcgaccgcttttgagatcgggtggccacttgacgccgtcatgctgccaatgagacgttccgctcctggcaaggtgatgtcagcctcggagagcgagagccggccacaagagagcgtgcccgtcttgtcaaaggcgacgacggcgatgccctgcgctgcctggagggcgtttgacgaccggaaaatgacgccctcgcggagcccggcacgcatggtcgacgcaacgacaagaggaatctgcagggagaaatgcccgagggaggtcagccaggcgggcgagggcgagtgccgcgaaggcgaaaacagactgaccgccagaccgatcgcacaggggcagctgacgatgaggaccgagagcccgtaggtgagcgctctgaccgccgaggccgaggctgagcgcgagcgcacaaaatgctcgaccagcagccagacaacgaaagagatgacctgggaaaaggaggcacaggcggtcagccatcgcgcggcgcgacttaacctgcggaagaagtctcacagcgacggcagcggcgacgggcaggatgatggctgacacgcgatctgcagtgtcctggaagcgcgacttggacgcttgggcgaatttgacgagaccggcaacgcgtgcgagcgagttctcgtggacgagccgcgttacctgaacgtcgagcgagccgttcagattgagcgtgccggcgatgacgggcgccccgggcgacttgagtgcaggcagcgactcgccagtggccgacgactggtcgacctcgctagctccagcgaggaccaaaccgtcggtcgggatgagggtgtcggcccggatgcgaacgacatcgccgtagtgcagcagcctggcgagacggagaaagaggtcaggccagccgtgcgaagcgaacgacgacccgcccgaggggccaaacttaccgagcatcgagtggccgctcgaccgtcgttcggcccttcgtctcgagcaggatgacttgggtcgactggaggccttgcaaagcgcggatggctgagctggccgaccgtctgctggtcgcctggacgagccggccgacgtagatgaggctgacgagcagcgccgtcgtctcaaagaagggctcggtgaagcgctgtccggcgagctcaaaagcaaaggcgaagagcgagaagatgtaggccgtgagtgtgctgacggcaacaagaacgcccaagtcggcctcgtgcaggtagacgagcgaccggaccgaggacgagacgatggggaagccgatcgcctgcgaagaggggctgctatcagtctcgagcatgcctgaagcaaggtggaagacgagagctctcaccaggatgagcgtcgtcagtccgaccgacaggccaccataaacggcaggctgatctggtagcggcgcccaggcaaatatgagcactgggatgctgagcgtgcaggccgcgagcgtgcgataggcgatcctgcgaaggtcttgcgtcgagcgatcgtcggcatcctccagcgcgttcgccgggaggagcgtcgggccgtacggggcgagctgcgcaaggacgtctcgcggctgctgctgcgtcttctcccccagcacgtcgagcgagagctcttcgaagccaccgagctcggtccggtgccgagcgtgcaaagactctaggaggtccggtggcggaggttgggcgaaatggacggggaggatgacgctgttctctgtgccagtcgagcgctcgccttgtccgacaggcttgatctggaagccagtcgcgcgggcgacgtagcgggcgaccgcatccgccgtcaccgtctcgggatcatagacgagcgtggcaatcccggccaggtagtcgagaccgagcggcttgacccttaagaggttcgcagcaagcatccggcagggtcagcaggtgagacgaaactcaggatgggccggcacttacgaagggaggcgcgagagcgcacgaccgacctttggcagacagtcgacgcagtccatgcctcggatttcgagtgtcagcggctcagtccccgtcgaccgcccctcatcctcaacaacgacttcctccttgacctcttccttcggctgcgaacaggccgagctgacggccgggacaaccgcctgcgtcttgcgccggtcggtggacgagatgaagcagcacgccttctgggcgcagaccgactcgaggacacggcagcagcggcgcatcgtacgcgacagatcgtccagggctattgaaaggacacgggctggtgtgtcgggcagggccgctggcagaaggccggctgcggtggattctgcaggtgcgtaggcgggctcttcatcagttccgtttgacttttaagctccgataaagcgcaagcgtaccagagagcgtcaagccaagcgcctgcggcgtttgcacgaggaggcgcacgcagcatgggcagagtgagtctggcggaggagaccgagaaggaacgtcatcagcagcaagcctgataaaacactgcggaaagacactgaccgtcatcctcgtcgtcagtggcagcagacccagcgcctcccaaagcggcgtccttgctcgtgttgtcgcagcacgcgttcaccgcaggcgcacagcagctaccctcacgactggcagccttcaggttccgctcgactggaggcttcgtgcaaacaccacagcacccctgctcctcgtcgaatgagttccggttcgactcgccgcaggcgtcttccgctggcgaagcgggtggggcgtcgcagcatccggcggcgctggcgcggccggtcggctgctcggccggttgaaggctggacccgcctccacgggtcggtccggcacagcagtcatcggtgtcgccatcgtcactgacgtcgctcgcctggcagcacccgccgccggcagagcagtcgtcggcgaccggcgtcggcggcaatgaggctggcggtgacgcgcagcaaggcgagggagggcagcaagtcggagcctcctgggttgtcgaagacggagctggcccgcaaggctcagcgtcgcagcaggagcaaccggttggcgtcaaggcttgctcccgacaggtcgggtcgggaggggcggtcgagcgacaggtgagtccgggagcggccgccgctaacgaggtgcagcaagtgcggctgcagccggtcgaggacgagccgcatgatttgcaggtgcgagggctgggcatggcgatgggctgttgaaggaagaagggcagcagatcctgagcgggcccgctaccttaagagtcgccggctggccggatgaggcattagtcgtaaaaagccgcatctggttcggagcaaccggacgactcagacccggagcaggatgagtagcgtacgcgaggacgggccaggagcggatgtcaacgggcgttcagctaggagcgagagaggcgatagggcgggtcagagcaggtcaggaagggtcatggtcagagggagctcaagaggaagcggtcccctcctctcttcccccccgccaacgacgaccgcgaatcgctctctgccttctctcccgatagacttgcttgcatggccgcactttcccagcagcagccgcagggcatcctgtcgacctcggcaaacaacccgacggcatcgtcgtctgacccgacccgcaaggcacggctcgtcgggcccgagatcgtccagctgcccgacccggtcgatgcagagtcggacgacgagacggatgccgaggacgacggtgcgaccgagctcggcggcgagcctcgcgtccgcaacaaggactcgctgagggacgtgcccgacgagacagaggtacgggtcttcaccggaaggtcatcagtggcggtagcagcatgctgactgtgctccttgcgcgcacgcgtccgcaggacctcgacctcacccactcgagcctggacgacgagctcctgctccagctccaaattccccgcttcaagcagctcaagcggctcggcctccggcagaaccagctgacgtgcttgccggccgaggtctttggcggcctggtcgagctcgaggacttcgacgtctatgacaaccggttgacgaccctcgacggcctcgccccgctgaccggtctgacgtgagagccttccttcgtccctccctgcgcatcagagctcggactgacccctcgctgcccacaggtcgcttgacttctcgtttaacaatcttcgctcactcctcttgccgccgtcgcacgcctccgccgcgacgccgccgctcgaggcgctcgtcaagctcgagcaagtctacctgatccagaacaagatctcgcggatcgagggcctgaccggtgcgggacttgcgcagaacctgcgcagccttgagcttgggggcaaccggatccgggtcagcgcgcttgcgattgtgctcagtctgccgtgctcatccgctgacgccctgctgattgtcgctctcaacaggagattcaagggctggagaacctagccgcgctcgaggagctctggctcgggaagaacaagattcgctcgctcgaggtgcgtcttgtccaggctccgatgtgacgtcctcagactgaccccccttctcttcgccctaccgctcacagaacctctcggccctcaagaagctcaagattctctcaatccagtcgaatcggatcaccgtcctctccggcctcgaagagctcgagagcctcgaggagctctacatctcgcacaatggcatcggcaagattgagggtctctcggccaacaagcggctgcgcgtgctcgacgtcggcaacaaccggatcgagaagattgaaggcctcgagggcctggacgagctcgaagagttctgggtgcgccgagccgctctggcagggtctttcaagccagcccaatgctgacgtcttttgaggacggccttctctctccctttcaacaaggcgagtggcaaccagatccccgacctgcgctcgctcgcgcatctcgaagagaagacgaagctcgagacggtctacctcgagggcaacccgtgcgagacgaacgaccgtggcggctaccgtcgcaaggtacgacccattctccctcgcgctcggacgcgtaccattgctgacccctgcttcgctcgtgtttcgcaggtcatcctcggcctcccccagcttaagcaagtcgacgcgacctttgtccgttagagacactcttttagacggaggcgccgtgcccgcgccctttttgacgatccccgcacttcacgacatctcatggacgcttcctgctgacggtcagggcgagggtgcgagtgaaagggcatggcatgcggggacgcacagcgtcggatgggagggccgggtatgaggtgacggagggtgaaaagatggacacggagaagaaaatccagcgcaggtgacacgaagggaggacggcctcagacgacgaccctgcgcgtcgagcgagcaggtcgagccgggccgtcaatgatgagcctgagccgctctcgctcgagctcctggtgctggtggagcaggccctcgagtcggctgatggccgggtcgcgcgctgccgtcgtcgccgcccaggtagcgaccgtcctgtcctcgctgctgtcggtcgcggcgggcgtcttcggcgttggcgggggtgtcggcggtgcgactcgctcgtccgacgacgacgagaaggcagacagggggacgctggcgagccgcgcgcgctcgaggacggtcccgaggctcggctccgggtcggccgacgagacgcccgacgaagggtggtactttgaccgacgccggcgggtgaagatgcccttgatgacggccgaggtcgacggcggcaggcgcgggaccgtgtttgtgatcggcaggcgtgggtcgaggtcctgaagcaggggcgtcgcaggctgatattcgacggccgacgaggggacaggagggacgtcaacgacgaccggcatcgtgtcttgactcggaaggttgggcgtcgacgacgtcaacgaggcgatgccgtagaagctgccggtcttagtcgccgccggcgaggacgcccggctcgcccaagcgacgtcggcaacaaccttcgacggctcggtcgcgctcggcaggctggagacgctccgccggaaccgggttgcaagaggcgagcgcggcgcactgctgtcgcgcagccggggtgtcgggatgctgtcctcgagagcgacgtcggccggcggagggatgacttggatgacgagcgtcggcccgcccttgccccgtcgctcgccgagcgtcccgcgctctgagagctcgtcgccgtcgacctcgtcgccgtagacgctgacgccgccggtcgcatcctccgccgttgtcattgtcggcagcgccatatcgtcaaccgtccggccggaggacgagctcgagagcgtcgacgacgaaggcggcacctcgtcgctgttgctgctcccgacactcgtgtacagctcggccctctcaaactcgtctgggtcaaagtcgcccccggccgcgatcccagcccaatgcagacgaacggtcgacgattgcgcgacgaggtcgtcgtcgctgaagagcgagctgacgatcgagtcgcggagcgtgtcggagagaagcggccctgaagcctggcggcggaccgtcgggagcgcgccaaagaggtcgggcgtcgacgcgaggccggcccggtcggcatcggtcggccggcggctctggcgcggcagccggcgcgtcgtgaagcgtgggctcttgttgggcgttggcggcagctcgggcggggtgggtggcgaagggaaatgtgatgagctcgagcgggccgacgagctgccgctgcggaggctctggccgaccgcctcggtgaagaggctttggcgccaggccgtgttgggcgtcactggccggctggccggcgccgatgtcgttgaggacgacggcgtggccgaggagggcaggaggtaaagctgcgtctcgggccgggcgagccgggcgttgcgcgaggacggaggcgagggcagcggtcgaggtggcgccccgacaacctcgcacagaagctgctcctcgttgatgctgtcgtgcgaaggggatcggtaagtcagcgtcacgaagagcaggtcgaggggacggctgactgcgacttactcgtacgcgccaaccgtccgagcgcgtacccgcgccttgcgcttctcacgaagcgcgacgctccgaacactttgccctgcgctcgagccgctcgagccgatgctgtcgctccgggcgagcagcgactgggcaactgtgcgctcgacagcaggaggcggtgcggcgcggacgacgcggggcgtctcgccgatgcctcctcgctggcggagggatgagaggtcgagtcggcctttgatgtgcgagggcgagtgcggagaggaaagcttggtccgctcggtcagagccgccaggtcggcatcactcatccgccggtgaagcgccgggagaaagtaggtcgctggcggcgggttgacggccggggtcgatggcgctgactcgaccgtgggcgccgttgtggtcggaggaggaaggtcgacggcgagggcgtcgtctgggagcgatggggtcgagcgcttgtcgcggacgttgcgaccaggtgagatgagggcgtcgactgagtcgccggccaggatgccgtgctgcagcggcggggtccagcccgtcaccagcgaggggcttagacgcgatgtcgagccgacgccagccctcggcgacgaaggaggcttgaggctgcccttcttctggccgagcctaggcaaggcgggctgaccagggtcgctcttgtagagcgcgagagacgggcggatgatgctggcggcggcggtcgaaggcaaccgaggtgcagcgggcagcgattcagggtagccctggcggggggcgagtggtgagcggggcgaggaaggaagcgggacgacgacgcctggagagagccggagggcgagcggtgacagagaagctgcacgcgtcggttcgcgagcgcccgtggacgagcgttcggcctgaaagatggtcgggcgaggtcaatgacatagctcgttcgcactgccaaggggagaaagagagctcgaagacgcaccggctcgccggcttccctttgatcagccatcgagaggccgcgagcaacgctgccaccgccggccgccgacgtcgtgctcgcctgcccgtcagcggccgtccctttgcctttgcacgatgagcagaggcgccgggcaccgtcgttgtccttgctggcggccatcgaggtcggtgttgacgcgagggagggaaggaagcttggtgcgattttcgggggggcgagggaaggcaggcgcgtcctcttttgacgaagcgacgggcgactgcgcggtgggccgaggcgagaggagatgcgaggacgacgtagccagacgccggagggagagggacggacgggataggaagctggaagatcgcagagaggatggctgctaggagaagaggagagggagagaggagaggaagggcgaggtgcgagctggctgtcggcccttcgctcgaccgctcgctcgaggcgaggcgagccaagccgacgacaccgagcgagcagtgaaagggttcgtcgagcgcctgcttggtctgatggcttgcttgcttgccagtcgagctcctcgctcagcagcggatgggtggcgctcggggactttccccacgaccgacggaggaagaacgtccctcgacgctcctactcgctcgctcgccatcgaggcaaggcctgagcaggcgggtcgaccgaccatgggctgcgctgctgcgggtcgtgtgaagcgtcggcgccaccagcagagtggcgttcaaagagggcgggctagagggcctgggtcaagtcagcacccggacagcctagccgggccaccagcagacggtcgttggatcggcgggtcgtggagagcagtagtggctggctcataggctggctgacgggagggcgagccggcgagtcgtggcagcagcagcaggcaggcagcagcgtctcgagcaaggaggggcaggcagctcgcgagcacaaccagcgtcagctcgaaggcttcgagcctggcatttccctcgatcgtcccaaacgcccccctccaccctctccgcttctccacgcctcgctcctcatcctctccgccggccgcccgcaaagaccgcgcgcgccgatctctcgatagggcgggagcagaaaagccagcaggttcgttttaaatcgtggcgcacgcgcgaggagagagatgtgaagggggagagaaaagcgcctcttcgcgcttgctgcctgccgctgcgggccgtctctggcggctgttctgcgagggctcgctcgctgtcttactgcgtcgacgctttctggtcgaagcagctgggcgagggagagatggtcgttcggataacgggtcgtgcacttcttgcaggtcgtcggcactctaccgttgtgtgtgcgctaacctctctctcgctcagctggcacaagtcgacccgcttctcctcttcccaacccgcgggttccgactaagtcgactctctatccgtccatgatgcccgagtcgacgtgtggcgtcctcaaaaggcgcgctgaagccatggcccgccgtggctgagcgcaaaagtaacgggtgctgcttgctctcggctcttaaaacgtcacctgtcggaatcggaagccccacagctgccggccggctggtttccttctggttggtcggtcgttcgtgggctgacgacaagaggcgggtgcatgggcgcgcttctcgagagctttcttgacggtgcgctggcctggcgagctgcggacaaagggcgaggaaaggcgtcatggcgagcgaggagaggggggcgggtactaaggggctcccagagtccccctttggcgtgtgcgtgagtggggaagggtgggtaggatgcaagcgggatgcaaagcgaggggattaagaagggcttggggttgggggtgttagtgaggacgaaaagtgaacggggaagatggagggggtcggccgctgaaagagcgcggcgccgccgccgaggagggcaacagcacagagagagaaggaagagcgagagagcgaagccgcccggcagagatagctggccgaggacgcaggcgagcggcgtgcgaggataaaccggatgagcgcgcgtcgccgcctaggcgtcggcgagctggatctttgcccactcgcgcgcaaagctcgaggccttgaggtacttcttgtgggcaaacttgcggcagacgtagtgggcgtcaaactcgggcgtcgcgagggcctcgataatgtagtcggcgccttgggtgagctggctctcggtaaagttcgagtaatagacgaagccctcgttctaagaggggacgggcggtgtcagcttgcctaaagatatgtcaaaaggcggtgatgtcgactcacccaggtctttccgagcatccggttggcgaggtacatgccgatggcagcgatgaggctcggcttggcccggaggaagcggtggtcgagcagggtggcctcgatcaggaacttggagagcgtccgcgtctggaggtcgtagtcgtcggcctttgagatgcgccggacccacgagtagggcgagcagtaggacgagacgttgaagtcgagcgtctggaggatgatgcgctcgcccttgaggatctcctcgcgcgtgtagccgttctcggtcatgtagacgaactcgtcgaccgacggcgcgagtatctcctcgtacttggccgcgatgaacatggcggtgacgccgacgagctggagcttgacgagcgagacgacgcggaccgagaggaagcggtcgatgatgttgacggcgatccagagcgtctcgggcagcatgtggtaccggaggtggacctggagcagccagtcgacgagcgtcgtccgcatcgaccactcgatctcggtctgcgactccatgtagcgcgggttgggcatcgtcttgagctggagcggcagaaatgacgggtcagtcggcgggctcaggagtgtaactcaaatgacagcagggcggacctcgagctcctccatataggcaaagatgtcctcagcatactcggcgaccatcgtagtgtcgtagaggtcgacgtcgtcctcgaacgtcgcccgaacgccgtcgagcatcgaccgggcgtcttcggcctcctcggcctcgagccgggtccagtcctccgggtcgtcaaggaactcgtcgtcgtccgtctcgctaaagtcgtcccggtgccggttcatgagggccgtcgaaaaggcggcgtcgtcgctgtttgcgtcgacctccatgccgccccgggccgtcgcgtcatcgtcgtcgtcgtcctcctcctcctcgagcgtctcggactcgacgaggatcaccggcttcgacacggccgatgctgccggccgggcaagcggctggcgcgagaccgctgctgtcgactcgtggatggccgaggacgagttcgtcttgttgacgacggtccgtggccggccagcgaccgtcgccgagacggtcgacgtcaggcccgacgtctttgcgagctttgacggctccttgccgtgtttgccgtcgggcgctgacgactcgacctggatagtattgagagaagaggagggttgtgacggtcggcgtcagtcaacatggcgggtcggaggggcgggcgggtgcgggggaaaaacaaggccctgccccgctcagggaaccaaggctcgaaacgggtcgcaccttcgtcttgttgctgacgtcgccgaacgcagcccgcttgacgccagcgaccggcttggcggcccctccagcgaggagggcgtgcgtcttgccccgagtgacgatgccgcctgctggcgcggccgagccggacggcttgcgggcgtgggcggcggccgacggggcggcaccggcggcgttctcgtcgaggggcttagtcgtccgggtgctagcccggcggggggcggcggtctggaagggagcaagagagcgaggagaggaggaggggcaaaggaaggacggacggtcagcgacgttgttggccgagccgacctgcctccttcctgctggcgcgcgcgcgcgagccatgacgacgggagagactctcgcaccggcgagaacgcggaagaggggaaaagaggacgtacgcgctgcatgatcgagagagagtcggccgcgggtcaggcgagaaccagagacaggggcctctgtgagctagggcggggagaggtcgtgttgttcggagggagggatccgtcggaagggtggcaggacaaggaggttgggggttgtctgttgttgattcaaacctcgcgcgagccgaggagagagggaaaggaagggggcgagcaggaggctgaacaaggagcgactgtgacgggccaagccttgagagaagagaggagaaggagaaggagaaggagacggtcgttggctgatggctggtcgtttcggagaggcgggaagaagcggcggcggcgcgcactaaccctaagcatcgtaaaggcagtcgcgtcggcgcgcgcgcgccactcccttccgcagcagccgcccaccacgagctgcttttgctctctcagccatcggccagcgggccatgggggcagggtgaggacgggtccgcgagcgattccttcgcagactccatcttttccgagcgacgctttcagtcaagagcatgggccatcgattccctcagagacaatggttccgtttttttttggaacagcacgcgagcacagcaagatgctcatccagtcctgcgagcagcctagggagaacagcctagcaagctcaatagtctatcaggggcggctttactggccgcactctgcaaagaaggcaaaaagccagcgtcagtcacccgagtcagttgcgtgagagagagcctcgacgcactccagaagcagatgtcgccgtcgacaacctcgtacgtcttgccctgctggcggtacttgccagcagccttaacggcgttctcggagccgtactcgaccaggtcgctttgcggttcgaggacgagcaagggagggaggtcagccgggtgcaatcttgcgtcgcatgtcgctgggaagaggagggaacgcactcgtaggcgaagatctctccgcagacgaactggaaaggacaaggacgaccagtcgtcagcgttctgtcccgggaaaggacaagtcaaacacgactgaccttctgctcaaagtcagagtggatgacgccggccgcggcgggggccttgatgcccttctgaacggtccacgcacggacctcctgcgggccgcacgtgaagtagcggatgaggttgagcgcggcgtatccagcggtggtgctgcagaaggcacggtaggcaagggtcagtcgacaagctctcgtcacggtgacagaaggcggacgtacatcttgccgaggccgggcgtgaggcccttcgcctttgcaacctcgaggccgagcgtctcgagctcggcgttctgctcctcgtccgaaagagggacgagccgctcctcgagtgcgaccgagaaggggatgaggaggtctcccgggttatgctcgtcgatccacgccttcatcttaggcagccacttgttcttcttgcggacgtagtcgcgctcagagaggttgacgaggtagatgacgggcttggccgtcagcagctggaggtcgttgatgacctcaatctccttggtcgaccacgtgcccttgcggacgtccatcttgtcctccgagatgtacttgagaaccttctcgacaatggcctggcgacggggcgatgagagagcggacagaggtcaggacgagccaccgaagctgatcagggaaggggactgacggcttcctccttcttggccttgtcggcgagcgacgtgccgccggcgatccgggcgagcttggccttctggacgagcgtcttctcaacccagtcaatgtccttaagccggagctcgttctgaatgatctccatgtcgcggatcgggttgacgtcgccctcgacgtggatgacctcggcgtcatcaaacgcccggacgacctggaagatgccgtcgacggcccggacgtgcgacaggaacgagtttccgagaccggcaccggtcgaggcgccggcggtcaggccggcaatgtcgatgcacgtcaggaaggccgggacgaccgacttgggcttgtacatgtcgcacagccagtcgaagcgctggtccgggacgggcatgcgagcctcctcggggtcgctggagagaggcgagtgcaagggctggtcagacagagtgcccttccctcaagcagaacgcctgcgagcgacaggagcgagacgaacatggttgcataagggaagttggcggccttgccgaggtctgtaaaggcacagataggcaagctgttcagtccgaaggtcaagcagggcagaaccaggctagcagagaaggcgcacccgacttggaaaggacgttgctgggttcggtgcggctgacgttagctctagcacgaggaagcagcaggaagagcaaagactcacaagaacgacgacttgccaacgttgggcaggcctagcgaaggatagcttgaggtcagctcaacccccgcaggtgcttcaggtcgagcagagtaggtgctcggcctcagccgcagcgcgctcggagggacgcaccgacgatacccatcttcaggctgagggagcaggaggactggtaagctgagcagttcgccccagacttgcaggcagaagggcacttacttgtttcccgggcggccgagcatgaccctggaagatcagccgggagaaggagagagtgtcaggcgtcagggtttcgatcgctcagctggtgttggtcgctccgcactgacttcttctccgggacggcgttcttcttgggaggcatctttgcttttttggcgagcgacgggagcgaggtcgtgaaggtgcggacggcggctgggcgtgaagggagctggaagaggacggcgagcgtgctctgcatgtatgacgggttggcgacgagttttggagaggaggggcaaggagaggctcaaggggcggcagcgatgcacccggccaggctcaaccctttgcatttcgacaggatccgatccactaatctgcctcgtcaagtccatctgtataagccggcgatgacttcgtgacgcccaagagaagagagagagagatagcgtgagaaaagggaaggacgcccgggggcgggaaaatgtgcgaaggcgaacgaggtggttgcgaaggggcgcgcgctagatgaaggccgactcgttcaagagcctttcaaccgccaagcctgagacgggtcagcgtgcttttctcacgacagcgggtcgatccgggacgcacctcgtgacgcggacggcctcggtctcacgcggctcgagctcgatcgagcgctggtagacctgctcttcggtccgggccgcattttcttggaactgcttctcgaggtagagctgtatcggcgcgacccggttgaggctgcgggacgacgaaagggtcagcgatggcaaaggagagccggcaacgaaggtctgcgcacttatacggcatctgctgaaagccctggatctcgcgcataacgaccgcggccttggtccactttgcaaagttgaccaggcgccggccatcgcccgggaggaaattagggttgccgtcctcgataaaggtgaggtaggttagataaacgcctgcgcgtggatcggaggagagaagggtcaggactggtcagcaaagccggtagagcgcagcgtgcgcgtcctagacgcacccaggaagggcaccgctggcgggatggcgtcctcgagcagactcttgtagtgggcaaagttgcgctccgagtcgaccgcgcgcgagatcatgctgagcgtcgcctgcgatttggcgctcagctgctcaaacgtccgcttgagccgcgagattgacgacgagttgattccggcgacgatagcggcgacgctgctgaagttcttgagcacgttgaggcagcgctcggcgacctggataaagaacttgatgaccgaggcgcgagtcttgggttgcgattcggcgaggaccgacacctggacccagcgcgagatttggttgctgagccggatgccctgccggatgttaggcccgtgagccgggtcgaggctcgaccatgacttgtgcagacactcggcgacggggatccggttgaatgtcgccgtctcgattagcgtcagctggcgggcgacctcgagcacgtcgaggtcgttgatccggagcgtcttgcggttcggcgggaggacagaggccggaggtggagcattgtggctgacggtcatcctgcgcgacaggtggccctctccgttgccagtggcctgcagacgagagcagcgcaaagggtcaggacggaaggcgctgaaggggcgttgcaggggcacgaggccgtaccctggtctcaagggcgagaatgagcgagcgcgcctcgcgcttcttgacgtcgtccggcagccgctgggcaaacgcctggataagcggcaggtcgctcgggtcgtattcgacgtagttctcggtgatccaaggtttcaggatgttgatgaccctgttgacgttggcggaagaaggtcagctcttttcccggccaatggtgtaagatgtggcgactcacttgagccggatcggcatctgcttctccatctgccagcgtcgcatctcatcctcggtcaagccggtcgggggctcagtgtagaagcgagcctcgagcaggcggacgagctcctccgacgtcgtgaaacacttgaacgtcatgaggaagctctcgcggaacgaatgggctggacggcgggtgaaagtcaggttcagatgcactccacaacagactgcaggaagctgcgcgcaccactatattcggaccggtgctgcgtcaggcgcgtgacgagcgcctcgatcgacccgcccttgatctcgcgctcggcgccgtcggaccggccgtcggccatcacaatctcgtcctcgttgacgtcgctctcgaggtaccaaggcgtgtcggccggctggagaacgacagcattgacgctgttgacgccgaggagcttggacgctttgcccaaaccgcggctgacgtccgtcgtcactggcgaggaccaagaggcaaagagtcagctcgagactttgtctcggtcgggtgcgcgcggacgcacgagaatcggcgctctcgcgccggccacggagcgcattcagcgcatcaaagttgctctttgagctgacgccgctcaggcgcgagtcgatcccgtagcccgactcccaagggagcgacgagctcgacgagacggtcgacatggccgagagcgagccctggcgcgcccggccgccattgaccgactgcgccgagctcgcaaagtcggcgtagctgaactggtcgcggatctcttcgtcctcctcggttggcttgtcgtcgccaacctcttcgtcgagcccgcgcgcagccctccgaccggaccgcaagctgaggagctggctccgacgcgagccgatcgagccctttgaccgggcagagttgatcgagaggcgcgacgtcgagcggtcaaccgtcccgctgccaccggcgccgccggccgacgaggtcgacacgggccgtcgcgcaccgaaccggcccttgacaccgccgatccggcacgcatgggtctgagcgagcgagactgtgttgagtgccatgaacgctttgaccgagtttggcagatgcctccggagcgcggcgaggacgggcgcctccgcctcggccgacgagccgagcacgcaggcgagatcgccgagcgagcacgtaaaggcgtcgagcgcgagctcaaactgccggaggatctcattggccgagccgacaagcttagcgtacgtagggctgctcgccggatggggctcctcgccgtcgaggtcgatcgccagcgcgatatcgaagctccgcaagtgggcgaggacggcctggacggcatcgcagagcgcatctgccgaggcgaacgagtcgctcccggccgcgtcgcccttctcggcgtagcggtcaatctgccgcaaagcctcctgctcgagctcctgcaggcgctcatcttcggcatcgagcccaaacggccgcgtaatgacgtcccgatcgagctcggatgagaagccgccccggcctccgagcgggagcgcgacgcccgcagagtcgagccaggcttcaagccgtctcggtcggcgctcgccggccgccgtcgtcggactaccgtcgctgctgctgccgccgcctccaaacgtagcagcggaggcggctgccctcccgcgctctgcttcgagcccaaaagcaacgaccgtgcgctcgacgtcctcggccgcacctacgacgcggcgctcctccttgttcgcaacgtcgttcgccgctgcgtgccggaagagctcgacggcgccaatcaggccggtgaccgcccgctggaccttggcgtgcgaacgcttgagcgagtcggacggcggcgtcgcgctcgctgtcgaggtccccaggacgcccgaggcgtagacgagcgctcgggctgccgcgagcacgccgtcgagctcgacaagaaccgccgcatccgcctctgcaaagagcgtctcgtcaaggtcctcctctcggacgaagcgctcaaaagcgatcttgagcgccttgacggccgtccggaccttgagcgcgaggacggggatcccgtcgagctcggccgacgcgagggtctcctcgagctccttaagctttcgccggttgtcctcgcgcgtcgtcccggtcgtcacggacgagacggacgcccgggcggcgcgcatcgtcgaatcaggctcgaggtcagacgtgtcgtcgtatggatcgctcgcgcggcgtgagaggtcgagcgtcgtcggcgctggcgacgacgcgcccgacatgtcaaagaagggcctccggcgctcgctttcgggcgtgtcggtcggcggcgtcggtcggtgtgcctggacacggcccgtcgagcgatcgatatagcggatcgcgccgtcgtcggcgaggcgggcagaccagccgagaggcagccggtcattaacttcggacaggagcgcaaagtcgccgcctccaggcggagcggctgcctcggcccgcttcggcgacgccggccgtcgatcggcaaaggtcgtcgaggtcgtgccgagcgtcgtcgtcaggccgtcgccggcctcttcgtccgagccgtccgacatctcgggcatgttcttgcgcgactctcccgtctgcgtgttgtggaagaagagctgcggggaagagggcaaacgtcaagtcgttagcgcgctatgccgagtgcaagagactggtcagactgacctcgccatccggagtcatctgtcgagagacgatcaaagggatcaagtggggtcagcaagcgaatacctccatcttcagagcacctgagaaaacgaagacgcaccctagggacccaatacagatgctcgtcgctcaccaccccatcggccggcgtcgagctgtatagctcctggcttcgcggcccaccggtaccgccggccgagaccgaccgactctcgcccccgtcgtcctcttcgccatcgtcgtcgttgtcggcgcgcccgagctcgtcctcgtcctcgtcttcgtcttcgagctgggcaatctcgtcgtccgtcagcgcgacgacgtagttggatggcagccacctgaagaaagaaagggtaggggagcagcgcagcgagtttcgtgtcagcttccgattctccaacccggggggtcctcttcctaaaacggtgcgagagcaagcgacgcacccccgacagccctcgaagacgccatcccaccagcccgtctcgagccggtggtagacgtggatgacgtcgcctgcccggaacgagaggctcgagccgtcggtcgagcggaagtcgaagagcgcgcggacgagcaggctggcgtcggcggcggcggtggctggcgaggaggatagcgtcggcgaagaggacgacatgccggcggcagcagaggcgagataggagctgctactgctgctgctgctgctcaagcacgagctgggccggccgctgcgagtgaaggtgccggcgagcggtgaggcggcgagggccaggcggcgcgacgggagccggtcgacctgctgctgctgctgctgctgctgctactgctgccggcggagttggaccggcacggggccagatacgacaagggtcggtgcgactgagtgcactaaggttggatgggagattgagcaggcagcgcaagaggagaggagaggatggtcagctctcgggtcaagctcgaaggagagccccgtgcgagcggcaagggctgacggacgaacgggcctcgcgtctccagatccgtttcagaaacttgctgaagctcaaagcaagtaaggccgctagagcagggcgacgtgtgcgtcaaatgatctggatgggctcgtcctgctggatgggtgtgtcgagggtgaaagggtcgggagggaccaagcacagccagacgagactgccggcgccgccgacccgaccaccggacccgcccgcgcggctgacggtcaacacgcccgagcgaggacaaagatcccaccggccaagtacgaccgacacgcttcgctcgcgcctcaagttcgctctgacaacgcagaggagcccgaggcggctcttccttccatctgctcggcggtcaggctagcaaaagggtgacatacagctccgcgtggagtgcccactctacgtctggcaaggcggcggtcaaagattcgagatgaaggaaagaagagagcccgagcaggggtttgctcgccgaagccgaccggtgtgcgaaggtgttggagaagggaggcagatcggggcgggagggcaaggtcgaggatagattcggacgagggccaaaacgggcagcagggagtggagagggcaaagaagggcggccggtcgacggcgccctgacagggaggcagagagcgacgacgatcgagacggccggcgtgtctgacccttcgggtatatgtgtgagtgtggaagtagcagacgagtgccaccctttaagcaaggccaacaaacagcgcccccgcgccgaccagcgcgccagcgagcgcgagaggcccagcagcgccgttgctcaggagcgcgacgcgcgacgagccgcccgagtttacgttgtttgcggcggcgcgcgaggcggcaacgaactgcgccgagagggacgggccctgtgcgggcggacgagcggagaggcgggcgggtatcagctactgaggtggctaggcagggaggaaaggcgggcgggacagacaatcttggcggtgtaggcctcgtagttgaaggttgctgcgggacaaggatcgtaggaggcaatcagcctccgcagcagaaggagggatacatgcgccctccagcgggccgctccgagctggcctgcggggtgaagaggagcaggacgtactgccctcatccggctggaaagtaacagtcgtcggcgcaaagcttgcggtaaacgtcgcggtccggactaccttgttgccgccggcgtcggtcgtcgtgtactggaagctgcaggggcggggcgcgcaacgcaacgtaacgcatccgggacgtcagtcggccagccgagaggaaaaaagggagctcgcaagcagggaggagcagcgacgtacaccgtgttcggccgggacgacgtgttctcctggccgacgacccggggctgcgtcgtcgttggcgtcgcggccgtcgtcgctgcccgggtcgtcggcgtcgtcacgacggcgcctgctcctccgggctgaacggtgctgaccgttgcgtctggcgtggggtaagtgagtgcgcgggtcggtggtcagcgagggtgcgggagctgaaggaagagtagggggaggcgaccgacaggtgacggcgccgagccggttggtcgtccgcgagacgacaatctagcgtgagcagcaaccagtcaggacggcaactaaagcaacagagggcagccagaaggacggaccgtgtctccgtcccgcacgctagaggaaggaaggagagcgtcaggtcaggtcgattcatcgagccaagcctccgctcggggctggcggtgaccacgcccgggcgggcagaggcgcgcgcgccccaaccggtagacgcactcaatggtcgacgtcaggaggacttgagccgaggcgaaggatgcggcgagcaggagcaagggcgagaacgagaggcgcatcgtgtagtagaggaggagtatcgggtggagaggaagaggatggagggggagagggtcgagtgtcattcggcaagctgactcatctggccggggttaatgcatagcaggaggttcgcccttccgacgcgaccgacttccctccctccctccctcctcctcccttgtcaactgcccttcttcaacccactcctcagacgctcctttgacacgaatcgacgacgaccatgcacctcccttcctcgctcctcctcccgctccttgctctcgtcgcatcggtcgccgacgcacagctctttacgagcgtcctggatggtgcgtgctcctccctctctccctctctttgacgtcgctgacctttctcctctcttttgttctcgtctttcgcagtcgatgacggcaacacggtgcgtctacatcctcctcagacccaagtctgacttgggagcagagcccgcgccgaccgggcgcctcacctgcgggctgcccagcaacagccgtgactgacgccgctctcgcccacctccaccgccttccccaacccgcagctcatcgtctcgcggacgctcaacgccgtcggcctcctgacctatatcccgtacgcctcccttctgctcgcccgcccgctctctcctttcatcgcaaacggccgctgacgcttgcgctctcactggtcgattgaaccagcgtctcgaccctcggtcttggcggtgcggcggcggttgtgacgacgccgacgacctcgcgccggacgacgacgacgacgccgacgccgacgaccactgcccggtacgctcgccctctccctttactctcaggggacgcctcgctgacctctttccctccctcccttttggcacccctctccagcaccacctccatgacgacccccggcgcggccgccgcgccgacgctcatgacgggccggcccaacgccgacggcgtcgccgtcacgcccgcgtcgggcacccagctctcgtacgaagacttttcgctcctcgtcgccaagccgctggcgtcggcgtactcagcgaccgtcagctcgggcggtgcgtcctcgtcctctccctctctcactcttcccttgaaaacctcgtttccggcttgcgtcgctgactgacctacctcgctcgccgctcgctccaccgcgttctcctcctccagccggccagcgcctgccctcctggtcgccctcgtccagcctgctcgtttcgctcggccttgcagtcggagctgtcggcgccggcgcgctcctcgcctagagcgcgcgctgcctgcctgccttcgaccctttctttccgggtcggccgcggcgctacccggcatggacactgttctcggcatgcacgctcgcgtctcgcagccgctcgcctcgctctcgctcgcaagcacccgccgtcggccttcctcttccatcttccgctccctttgctccctcgctcgctccttccgcccttagatctgcactcagacggtccttcctctttctccacctttctcttccgcccgtcccttttcggcggccttgcatccgaaggcaaacgggcgcaccgtcgcgcgaccggaggcccggccaagcgatgcgcaacccctgactgtcctccctataccctcctttccttcctccttcgcttcaactccggctggcccgtctctagcccccttctcctccttctctgccctctcctgcttctctccctgcctctgcccttcgccagcgccgtccggaggggtcttatacagcctccctccttcctcctgacagcgtccttcttcccttcacactgtgctactagcctcacatgcccactcggacgacgtttattgctcgcactgaggcgcgttcccgccagctgcagagcagcgagtatgggcaggccttgccgtcggtcgctccggcatgtgctcctttgtcgccgcgaagagaaggtgttcatagcatcgatctacccggccgccttcgacgcgaaagctccatccgtccccgcctggttcaactgcgcatactgcgccgtgtacgaaaacttctggtacctttctctcttcgtccgagagcgtccgccaggcggccgagagccgctgtcccagctggctgagttaattagaagcgggcaggcttttgtcgcgcttgaagccgacctgtcgtcggaagacggtgtagccgctcacggctttcggccggcgctcggttgcgaaagcttcggtcaggaaggctgagcgaggcagaggtggatagcgcgtcaaataccggttgctcagcacgtctggcgcaaacgcatgtaaaaggaccttctgcaaggaggaccaaggacgcacagtctctctctccagccaggccttgcgcttcacgctggaaaaccccggcatttcgctgtcgcctccgtccgcggtcgaggcgtcacttgaccgaaggcgtggagggacgcgactcagccggcgcgacagcgagaggtgcccaggcgactaaaccccgacgtgccctttgctctttctcagaggacgaccgcaacgtccatggacaacatggacagatgacaggtggacagagaaggctagtaggagcgcggtcccggcgccggctcgcgatcccagtacttaacgtactcgggcctgagctggtcaaggctcgaaaggccgatgctgcgcatcgtcgctggtagcttgcgaggctcgcgagcgcgacggccgagagctaggcgaggaggaccagctcgcaaaggctcttccgacctcgctttccccctcatctcaaccccctttccctcatcgggcccaccatctcgctcgtcggcccccgagctcgcagtacacaccgacccccgacatgttctcgaccctcggcctcttcggctcgaccgcgtgcgaggccgtcccgtgcaggcgcgtcggctgcccctttgctcatggcgccggcgcgggcaagagcaaagcggcggcggacgcgaggcggcttcttggctttggcggcggcgcgggctcggtgacggcggtgcgggggacggagatgggagggctggcgtcgacgaggaagcgcgaggcggcgacggacgaggtcggccaggcggaggagagggggcagcagcagcggccggccaaggcggccaaggtcgttgtcggctctcggccgggcacgtcgtcgacagtgagctcgcggccgatggcggccagcaagagcgcgagcaggtcgtcgacgatcgcatcgctccgagcgcaggcgagggaggcggccgtcccggccctgacggccaagccgtcatcctcgtcctcctcgtcctcctcgacggcagcaggaggccggccgaacgccgtcgcctcgagctcacggacgacgctcgacccgccgctcaagtcaagcctcctcacgcgcccagcgcccgcgttcggcgtcgcgtccgtccgatcgagcgcctcggcgccgccgaaggtgacgacggtcgtccggccgacgtgccacttgatcccgacgacggcgcggtcgtctggccctccgcctcaagcaacgagcagagcccagcaagccgagttaggccgcccctcgaagccgagtagcagtagcagcggtcagacgccagcgccggcaagtcgccgcccgcaacccgacgcgccgcgcctgagcctccggccgaccgagacggtcgtcccgctcaaaacgcgcaacaaggggctcgacgtcctattcaaagagtttcttaagctctacgtcccgctcgaggggaccgacggctgggagctcgtcggcctgctcgcgggggaggatgctctcgcgcaggaggcagagtgctacgcgaagggcgggaagacgggatacgcgaacgtccgttccaatcgcctctctagtgcgccgacgacgaaccccttgctgacagactttgaacgtccgctcgtgcaggccatcacgaacaccatgacggcgatccggaaacggccgtcgccgacgtcgacgtcccacccctcggtcggcctacagtccgcctacatcaagacgctctcggacctgacagcctcggccgcctcgcgcctgaccgcgcccgtcatcgctgcgctcgtccacccgcgcgccgagctcgagcgctacggctacgtcgtcgaggtcccgcgtgtcgagggcggcgagcggccgaccgaggagggccagctcaaggtttgcgaccggtgcaaggtcgagtttgtcgtcggcgaacagggtcacgccaagtgctggtaccattggggccgggcgcgatacggcaaggagcagggtgcggtgtcaccatgtcgatcggtaagacctactgaccctcactcattccgtgccaggcatccggacccagctcgcaacctgctgcggcgtgccgtggacaaaccaaggctgcacgacctcgacctaccacgttttcaaagagtcggacccgctcgacctccacgcccgggcgagctttatctcgtcggccgacctgcccgtgccggccgcgccgacccggctcgacgtcgtcggcctcgactgcgagatgctgtactcaaccgcagggatgacgctcgcgcgcgtgacggtcgtcgacgaggacgggaaatcgctgcttgacgagctcgtccggccggatccggcccgcgtcctgtgcgtcggtgcagcatcgcgtgtcgcttggtcagattggctcaatgggctgactctcgcgttcaatctttcacccggccgatgcagcgaccacaacacgaggtgtgtctgcgtcttggcccgttggcggctccataaggctgacggctcatttcttctctctgcctcaactaggttctcgggcatcaaacccggcgaggtcgaagaggccgccatgaacctcgaccgcgtacgcgacgcactcggcacactcgttggacccgagacggccatcatcgggcatgggttggtccctctctggccgccggaagttgagaagctatagttctgaccgccctctcacctcgtcagactcgaaaacgatctgaacgcgctgcggctcgtccacggcaaggtcatcgacacggctctcgtgcgtcgtcggccctctcgggttgaaaccgctttgaaagccgcactgatcgactttgcgcttctgccgcagctcttcccccacccgtcaggcccgccctaccgcctggcgctccgcgacctcatgatgaagcatctccagaaggtgatccagaacgccggcgcttcgggtgagggccacagctcgctcgaggatgcggcagggagcgtcgaactcgtcaggcagcgggcgaaggagatgcgcgagcggcaggcctaggcttggcgcgcccggcgcgagagtcgaggtttatcatgcgcatctgctacgaaggtgtacgcgcgggctttgggcgcccttgcttgtgagaggcaacgctcccgatgagatgtgcatgcgggcccggagccggttggcctgagcctacggtcggcgccgtggagacttggccgtgcatccgcgctgtcgggcgagtttgctcaaggagcggagaatggccggtgtagcggcccctcttccaaggatggagcgccgccatgcacctagccggcgtgcaggttgcggcgggcattgcgagaccgaggctcgtgattgacgatcgaccggcggcagaggcgaggatcggggtcgggacgaggctcagaggttgcgcacgcccttgtcttcgtcgtcttcctcctcggccgcctctccccgcttggccataccgtggaacttggcgtagagggcgtgcatcttcccggtcgtccgggagtcgagctcgagtgtttggcagcactcgtcgagctccctcgcatcggctaggacgtgcgcctcggccgacgcaggctggccgtcccaagggtccgacttgtcgcggcggaccttcttcgctacaaacagcggccgctggaaggcggccgagacgccgtgcgagagcgccaggatatgtgcgacgtcgagcgcgaggcggtcggaggcacgggcggtcgctgaggaggcctgcgaggaggatgaccaggccgagagagccttcgacaagagtatcagcggcgggtactgaatagcacgcgccgtcagtgcgcatgcaagtgctttgacggcctctgcgaaggagacagagcatagaaggtcagtgcctgtcagggagtcgcactcggtttgaagcttacctccgtgaagctcgagcatgtggaagacctcggcggaagagactgcgaggtgtggcgttgtcatccactgagagcggccatatcgtcagtcacgagttctgttcgagagggccagacaggactgaccatggctcggcagcttcgggcaatccgctcgccgacgacgccgtcgcggagcttgaggcagcagcgcagggccgtgtcgaccgtctcacgattatcgtagcctggggttgcattgagcgcctcacaaatggcaagacactcggcgtacgaccggcgctcgtacagcgaggccgcttcgaactctgtggaccagtcgtcgacgaccaacaaggaggagggtcagctgcgggcggccgacgtcgagcaggagggacgagcaagtcgacgcaccgcggtaccgctgctgctgcttctcctcgggcatcttggccttgactacgtcctcgttcgcgtaccactgtaacagaatgtcagccgaatgtcctttcgagattgaacgaggttgagcacgcactcctgcgggcgtctcggcctggcctcggccgtaggtccgcttgccctcgtcgatggcacgctggatcctcaattctttggtcgacggctcgcggggagcagcctcttccgactcctcctccgagtcgcccccgccgccggggaagagagagaggaagccgaggtcggtcgaagggtccgccatggtcgtcgttggccggcggttgacgcgaacttcgtcagactccggccggtgctgctgctccctccgacgctgaccctccctctcccttgcaaagtcgcttggcaagatgaacctatacttccaggcagcccaggtggtccgtcctctgctctacggcgaggtgatgatccgtgtctggccaggcaggcttgtgttgacacctcctcccctgcccgccgtccgcagctcgacacgctcgagctcaagcagacctcgctcaagtctgcgctcgcgtcgctccatctgcccgagaaggactcgaagcggctgctcgctctcgtcattagcacgctcaagtacaagccggcgattgcggccatcctcaagcttgttccttggtcaaaggacgacaagaaggcaatctggcccaagggcaagagcggcaacctcgccctcgtcctcgtccacgacctcgtctttgccgaccggcctgggtgcgtcctgcttgtgctgctcctgttgcacactcggcgattgaccttcctcctcatctcatctgcggcaaccaataggatccagtcgtcgtcgggcccaatcaaggacgccatccagcgcaacaagacgcgcatcggagccgagctcatcaagtacaagatcaagaagggtgtctcgagcaacaaggagctccaaattggcggcggtgtcggaggtgggcactaacgctcttttcaatctgcgctgatcagtcactgacctccgaacccccttcgaccttcgcgcagaccagattcctcgctacgcccggatcaataccaacctgacgacggccgagtcgctgattgcctacctccagacggccgccggcgggtccttcatcttcctgcccggtccgagcccatacccttcgcgcctccctccgcgcacgatccacctcgacgagcacattccgaacctcctggtcttcccgctctcgtcgtcgcccattctcacggcaccgcatccgtcgtacgcagccggtcacctgatcctccaggacaaagcttcgtgcttcccggcctacgtgctcgatccgtcgtcggtcggaggtgcagaagccattgatgcgacggccgcgccgggcaacaagacgagccacctgtcgatgctcctcggcaacgccggcaaggtccatgcgtttgagctcagcccgaagcggcacgagctgctccagaagatgattgccaaggccggctgcaagaatgtcgagtttggtccggatcctcgtggccgcgacttcctcgcgacgaaccccaaaggatccgagtggagcaaggtccagtacgtatgctgtgcctgggtcggtcaatcgcgcctctgactgaccttagcccccttcaggtatatcctcctcgacccgagctgctctggaagcggcatcgtcaaccgtctagacttcttgacggaggagggtgagacccctgcccgaccttacgacaccttgctgctcttgctgacttgggcgtcctggaagcagctgaggaggagaatgacaactcgaagaaggagcggctcgacaagctggccggctttcagctgtcgatgatcagggtgcgctatcctgatggtccgaggcgttggaaacggcagtgctgaccctacctcttcttattcctgcctgccagcatgccatgaaatgtgagtcgctgggtcgatccgcccgagcccctcagcccctgacgctcttcttgctcttttgcagtctcggcggcgcataggatcgtctactcgacgtgttcgatccacccagaggaggacgagatggtcgtcctgtctgcactcgagtcgtccgaggcgagggagtacggctgggaaatcgcgccgcggaccatggtcctcccgacatgggagcgtcgcgggcgagaggagtcgatccccaagcgacgtacgtccgagcagtctgacgcccttcacgagacccgtggctgatgtactctccgaaaacacgcgcagccgaacttgccgagtcggttgtctgttgcgagcctggcacagacaagaccaacgtgggtactgtcgctcgtccacgcgcgcgactcgcccttgtgctgattgctcgctacagggcttctttgtctcttgcttcatccggccctcggcggtccctgccggccactctgccggtccttccactgttgccgtcgagtcgtctgccgctcccgccgctgagacgacgtccgccgtaagcaagaagggcaagaagcgcaagggcgctccggaagcagacgtcccggtgccagcgccggacccggctgccacgccggcggtcaagacgtacagccacgcaacgcaaggcctcgacgataagcgcaagaagaagaagcgcaagggcggggcggccaagaaggcggccgacggagaaggcgagcctgccgccgctgcttcgcatggcggtggcgatccatgatcgctcttcttgcgacatgcgcgtgatctcgacggcagcgctcatgtcaatcgagggtggacctcctccgtgatggaggacaagtgtttgggcgcctccttgagctcctcttccgaatcgtagcccttgccctcgaggtcctcgtagaagtcgggcgtcatgccggccgagagtcggtcggtctcgttgaaggggcctgcgaaggggaaaggtccaagtcgcggtcagccgaatggacaagtgcgggcacgccaagagctgcctcttgcttacccttaagcttgccccggaagttcgcccggacgtccttcctgcagatgggtgaggtggttcagctcggttgcgaattcagtcgtgacgtcgcagcggaacggacctgaacgtctcgattgggtcgacgccctcctgcttgcagacccaagtgaaccactgcgcgaacgcgcattgtcagcgatcagctctataacgccacataggcgacgagcggcgcaccttgtgtccggctgttacgtgcgtcacctcgtccgagtggatgatctcgagcgcctcaacggcctcgaggtcgccggccttgcgaaacttctcaatcgtgtgcgggttgacgtcgagcccgcgggcctcatggactgaccggccagggtcagatacaaaggtcagctctgagcaacgaccgcttgatgtgcctaggacggacccatgtggatgatagccagccgggcccgcaagctatggctcgtctcgcgtgcgctgtcccagagccctgcgtggacggggtggtctccatagttgacgccccgcttgttgaggagcgcgacgaggagcgaaaagtgcttggcctcgtcctcggcgacctggagagggagcagcaggtcagcatcggaagggccgcgcgagacgactggcggagcgcaccttgacccagtcgaggtagaactcgtcggggatgatgacgccattgatctccagggcggcgaagcgcgcgataatgtcccacgccagatcgatcctgagtaaagggaagttcgtcagcgtggagcggaatcattaagcgtagaatcgaaggacgcacgcccactgctcaatgtttgcgagagcgtctgaaggcccgtacaatcatggtcagctcaagacgaggctttgaacagcgagaggctagcacgtacgcagcatcagtgaccgagacttctccgaccctcccttcccgcgcttgcccgttctgccaggggcgacactcccacccttcgactcttctcgcggcggcgtctcgtgtccgacggcgacgcgcgactttgcgccctcatcggcgtctaccagcggccggccattgagcagctcaggcgagcggacaaaggcaagcgcctcacgcgtgagcgcgaccttgcgcagcgggttggccgtcttgagaataacgagcgcgtactgcaggagcgtcgtcggtcggtcgctgagcgttcccggcggcgatcctaatgacggcgtcgagccgagcgagagcctatcgagcgacagcgacgccgtccctgacggttcgtcagtcgactctagtggcggcgtcggcagctcggcgaaggctgttgtgcgcacgcggtcaagacagtaaggttagctcaggcccaattgcatgcgaaaggggatcgagacgtaccctcagatacaggttcatacttgacgagctcccagccatcctcgtcggccttgccgggcgactggacgaggacgaagccgccgcgcagcttgacggcgtacgtgcagagctgcatgccggtgtcggactcgccgtcgttgcgcaggtcaaacgtgtaggagtgccacgggcagactacaatagcgtcctcgatctctgcaggtgtgtcgattccttggtattagctctcgccgggtgttgggccagcgggcagcagctgagccggaagggattggacgcaccagcgtggccaaggtcagcgccgaggtgagggcacttggcctcctgtcatcggccccgtccatagctgcagtcagcaagagcacttttcaacaggacgtgcagctgaggggaagggagactcgccatggcaaagaactcgggctcggtactggcggccgggctcgcctggaggcggaagagcaggagcttgtgcgtcgcgtggtccgggtggcggggcgcatagcgctgaaagaagaggttgtagcgcgtgaagcgcagaagctgcggcaaagggccgaccgagatgaagcgcatgatgggcgagagagaagaaggaacgggtcatgggctgaatggcaaaggaggaaccgcgcagcagcagcgaagcttgacctcctgtcccatggatgacgacctgtctctcttactcgagaactcacgtttcaccaacactcggcaaagatgacggccgatcagccgtagtatgagacgagatgcggtcagcaacatccaagggcgatcaaggagagggacggtgcctgggaagcgaagcagctccagggcgagaacggatctcatcctctggccacccttcctctggccatcgtcagtcgcacccggctcctaccttcgttccagcagcctcggacacggacgccgctctcgatcctcgatgcgacggttgcccgcttctcgccgacagcggccgcctggatcttcgacgagacgcgctcggtcgacctgctcggccaggcgctccagacggtcgtcgaccgctacccggcctggactggccagcttcgcttcgcccacgcccacgctgacagcagcgagaccagcgtcagccatgaccatacgaggcgctacggccggctcgagctcgtttacggcggcctcgaagcggaagacgctgtgttgaccgacccgggcgtcgagctcatcatcgcgcactcgtcagtcccgctcaccggccgtctgcctgatctcactgcaggcggcacctttgacgcggcgacggggtgacgcccgaggagctgctcgataaggagacgccgctcgcgcttggctcgcagctgagcctgccggccgtctacgcccaggtgacaaccttcgagggcggagggaccgccatcgcgcttaaggtcgcgcaccctctcggtccgtccttgtgtcggccggccttaacctttgctcaccactgatgggaattcttctcccctctagccgacgccaaggcgttgatccactttgtcaagctctggtccgaggcgcacgtcaccctcgcggagggccgttcgccgataccgacggcaacccctcctgtcgtcttcgaccccggcgcactcggaaggctggtcgcggacgagactgccctccggggtcggccaagagctgcatcggctcagattgacggtgcgcacgcgtacctgcgtgctcgtttctccatgaaggcaggcgataaatagggctggaaagaccggcagtaccggagggcaaagcaggttgccgtccgactagccgccgtcgctcgaggagccgacaaggtcttggagagcgagcgccttcgcgaggaagacgaaagggttgggcaacattggcggtgagggcggcgcgtcgtcttcaaggccgtccaccgacgtcgatcgcaatctctccgcgaccgaggctgcgccgctgttcgctcggtcgtccgctttaggccgtgcgacgccccggcggtccgtcgggaaactgagggcgatggttgcgaagcccgcgcgaagcggctcacggccggccagaatatgctccgtgaccgagacgtttttccgaggtgcagtggggcgggccgtggtgcgagaggagagtgtatgcgtcggggcgagcaagtgggccgtcgcgggcgtgacgggagcggcttctagagtcgcacgagcagaggctacgaccgagaagagactccgggggttgtcgacgagcgtagtgggcgtagagaggtggtcgcttgcgggcggcgagtccagtcgttccaggttagggtacgcagcgggcggagccggagggttgtaagccttgttggccgacctgacgtcctcagtgcccaagggtggtggtcgctcgtcgatccagtcggcgctctcgagttcgggatccagcccatctcgacttgagtgcagtagaacgttcgcttctgtgacaaccgcaacgaaagacgagtcatcggcggctgatcgaggtaaggccttcgggcggggcacgtcctgcgagcacgagcgagacaaggcctgaagtgccagtgtcagtaaggataaagggaagagacgatcgagacgcaccatcttcgggcttccttcggtggcttgcgcctgcggcctaggctggctcggaacgacgggaggcggaagctcgaccttgatgtggagccctgcccagttgtcttcggcgagcagcttctcccgatggaggtcgagcgagaggactatcggccgcgtgaatgaggtatcagcgtcgggctcctttgacagacgggagggacgactttgacctgggtcgccgtccaccgcctggaggatggccgacatcttgacctttttgacgggccgcttgccgtcctttgacgttcgatcaggtgccaagtcatccttgtgccggcgcttgagcttctcgagacggccctcttcgtcgttgccgtccttggacgtacgctcctgcaggctgctacgctcggcggtgcccgcagcgtccttcggagccgcgaagctcaggctgatctcggctcgcttgcgttcgcgctcggctgcctgaccgccggctgccgctgcgacggacgacgaaaggggaataccgagccgtcgttcggcgaagtagcgcttctggccggctcggtccgggtgctggtggcgggcggcgaccaggcggtggaggctgccgccggtgtagttggcgacgctggcgggccgcaggcgcaattgtatgtcagccctggcttctttggtgtagctagaggccttttacatacccaggcatggcaagatagaggcaggcagatgatggtcggcggcgggagagcgtgatggtcgccgggtgcgcggcagcggcgcagcagcccgcaggagtacgcctcgtcccccgtggcacttgctcactcgacaaggacttatcagagcagcacagcagggcccgttcagagagttcgctacagtcgtgcgcgcttgcgaagtcgatgggcggggggattgtcttggatacagtgattcgtccgcactggcaaagctagtaacggcgaggggagggtagggtgaagtacattgcgcgtagcgaacagcgtttagccgttgaggacagcaccaccgttaacgtggatctgtatttgcacattgtcatcacgtcagcttatcgtcgctaaacgattaagaggaaaacgctgaactcacgacctgtcccgagacgaacgaaccgtcgcttgaggcgaggaagacgtaggccgggcctttgaatgagagcagaggcagcgtgattagtttctgcagtcggtcgtcaagtaagcgagtgcgcggtacgcaccaagctccgagggctggccgatgcggccgatcggggccgggctggcgtgccactcgcccatcgtcttcgagtccatcgcagcaggctggagcggcgtccagacgggtccgggagcgacgccgttgacgcggatgcccttcgagatgagctggttcgagagcgagtagatgagaccacgctgggcggccttggtcatcgagtagtcgacgagcgaaggcgggccagcgtaggcgacctgcgaggtcgtgatgatgatcgacgagcccttcttgaggtgcgggacgacggcccgggtgaggaagaaggtaccgtagatgttggtcttcatcgtccggtcaaacctgcgagcggtcgaaggaaagaagctggtcagtcgggagcgacaggcgaaagtgcgtggcgtgcaggacgcactgctcagtcgtgatgtcggtgatcgagtcctggttgtacatgaccgatgcgttgttgaccagcactgttgatgaagaggacaatgtcagcgacgatggctcgtgcggcgtcagggccagcacgtcgacgcaccgtcgatcgagccgaactccttcaggacgaggtcgatagcgcgcttgcaaccctcctcctcgcggatgtcctgtagaagaacaagaaaaacagagggtcagcaaaactcatcgggaccaagaaagcagacagccggatgagaaccgacctggggaatgagcaggcacttggtgccgcgagcctcgaccatgcgcttggtctcctgagcgtcggtctcctcctcggggaggtagataatggcgacattggcgccctcggcggcgtagcagtcggccgcagcccgaccgatgcccgagtcaccgccggtgatgatggtgttcttgccgaccatcttctcggcgcccttgtagggcttgaggccgttatcggtctcctgctcgtagatgggcttggggccctcgatgtcgttctcgatgccaacattgcggtcgacctgcgtctcggccttgaacgacttgggtcccgggaattcggaggcgccgccggtgagggttgacttgacagagtcgacgatgccagacatggtgttgaggtgtagtaagaaggaggttgatcggtgaaggggtggcggagggtgtgatgggagtttcgagctttcgagctgttcggctctccgagcctctttaacccttcgcgcgacagggcgcgtcgtacctccaccctcgttcgcggtgacgttgcgggaaggagcagatgcggcgcgtccatcgaactcaaagaagggtgggtgcgggtgccgactgccggagcacgcgtgcgtcatctgttagcccatcgagagatagcccgtgggtgcccgtggccccggccccggccccgacggttgctgttctcgccggctggcgacttccgcccgttccggagatgtcagcttccgtgcgttcgagaggcagtcagtcatcgctacctgccagctgctgccgtcgtacggtcgaggtcgtcgtcgacaggtcggagggagcagcagccccggcctcctccgatgccctcctcgaaaatcaggactacccaatgccaggttcataatcccaaacggggctctgggtatcgttctcgctgatgggggggctgctgagatggtcgccgtagatcttcgcgacattcgcatgctcagatgggacgactgactcggcgccgcctgcgccgatggcgaggagagagagcgggcatgaatcgttgcgcatgcagaatacaactccgaggtcggccgacgacagcgccggcggcccacccggggacccagagaggaaagagagcaggagcaggggagtggaagaagcgagccaatagcctcgagtgagccggtcgacccaacgctcaagcggtcgctgatcctgcagagattgagaagtggcccaagaagcagagaagggcactctaggcggccgacagcttcttcttgagggcggcgttgatgtggtcgaggtactcggtcgtcgtgacccagtgctcgcgtctcatgctggttgtacgtgagggcgaaggttgtcagctctggaagacggcggcacgagaaaaagcgcgcatcgcacctcttgccgtggatggcgagcgcaaggtccttcgtcatgactttgtcgttctcgatcgcctcgacgcaggcctcctcgagcttcttgcagaaggcggtcaggttgagattgccatcgagcttcgcccggaaggcaagcccgcgcgtccaggcaaagatcgaggcaaccgggttggtcgaggtctcgttgcctgtcaaaacaggagaggcgaagaggagcgaagcatcagctcctgcacacgaccaagacggaggctgccatcacgaagtgatcgagcgacgcacccttctggtgctcgcggtagtgccgggtgacggtgccgtgggcggcctcggcctccatcgtcttgccgtcgggcgtgacgagctccgaggtcatcatgccgagcgagccgtagccctgagcgacaatgtcggactggacgtcgccgtcgtagttcttgcaggcccacacgaaaccgccgtcgcccttgatcgcctgggcgaccatatcgtctgagagagaacgggagggtcattcgcggcattcgaaggcgggtccagcttaaaaatggaaggtcgcatgcgtaccgatcagccgatgctcgtaccagatgcccttggacttgaactcggactcgtactcggtcgcaaaaatctcctggaagatgtccttgaaccggccatcgtacttcttgaggatcgtgcttgcaggggagaaggggtaggtcagaccagagcccccgaacagcagaaatggcggagcgagattcacttcttcgtcgagaggtagagcggcatcttcttctggagcgccatcttaaacgaggcgtgagcgaacccgcggatcgaggcgtccgtgttgtacatcgcgactgaaggacggtaaagcggccttcatcagctcctgctcgaaggatctgcctctgacacaagaagaccgttcgaacgaggagaggcacgcacgggcgacaccgggagcctcaaagtcgaagacgttcatcgtcgtcttggctcctccgtcggcaggcgtaaagaccatctcgagcttgcccttgcccggagcgatgaagtcggtggacttgtactggtcgccaaaggcgtgacgaccaatcgtgatcggcttggtccagccgggcaccggcttggggatcgacgggcaaatgatgggctcgcggaagacggtgccgttgagaatgttgcgaatcgtgccgttcggcgagcgccactggaagtaggccaaggaagacaggagcgttagcgcgagtcgagaagagacgaccgcgtcctcaagcggcagaatcgacgtaccatctgcttcagcttgaactcctcgacgcgggcctcgtccggcgtgatggtcgcgcactgccgagccaaagcggagcaaaacgtcagcacgatgctttgtcaacctagagaatcttccgaggcgcgccctgacggctcggatgagtcgaccactcatgctgcgcacgctcggacccgtcgatcagcgggcgagggcagacggaccttgatgccgacgttgtacttcttgatggcctcggcactctcgacagtgacgcggtcgtcggtccggtcgcgctcctccataccgaggtcaaagtacttgatgtcgagctcgaggtaaggcaggattaactgagggagagagcggggcagaggacgagtcagcagattggcaatgaagcggtcgacaatctctcgtgctggctagaaggaagggcaagagcaggaaggcctgctccccaagtcctgcttgcctcggtcgagcacgcacctcctcgcggattttcttccagatgatgcgcgtcatctcgtcgccgtcgagctcgacgaccgggttagcgacctggatcttggccagcgcctcgcgcatggcggccgacgtcgcaaaggctgcgggcaggcgtgggcggtgtgcaggtcagtcatggtacctcaacggaggcaggtgcgcaaccagcaccgctgcagctgtgtgtgctgagctgaggcgacagaggaaggagacgagcgaccggctctctcccttgctctcggccggagggagccgggcgagccgcgaggctgaacggaggatgaggacgtaccgcgcgaggatgccgagccggcgagcaggggcgaccggattgcgcgcgagggcaggcgtccaaaggcaagcatggcaaaagacgtatggtagatgggcaaggtgtgaggggagggcgaagcaggaggtcgaggtaagaggtcgaagggctcgtcgctttcgtccggccgagagtcaactcgtccgtcggccggaggaagccatcgcgccgagccggccgaagcgaccgacggcggcagcgcaggagtcaaggaagtcaggcctctctctgacaagcctgtactctccctaaaatgggccaagctgtccctagagtagtgatcaggcaaaccgcgaagcgatgtccacttactgaacgatgtcttgaatcctcgacttgccgacgatacgctggtccgggcggcgtcggccgacgcgacgtgccgctagcagtcgacagggcctgcatctttctgcgaaactcgctgataattcagctgcgagagctgcagctccaagatggccacctgtcgccgtcatcgctttgctcaaaatcatggactgacggcgccgacggggcaggcccgacggtcttgctgaagccgacgcgccgcctcggacgaagtcaactcctcgcgatcacccgacgacgacgacgacggcaaggaccgtcccttcttcgccaaacccgctagaagcatgttcgtccctcggtcagtcggcaggaagaagcccaccaccgccgctagtagcagtctcaacggtcaccgagtcacgtcgctcgctccgacgccggcgacgacgaccgcgacctcctcggccagctcgtccgccagccagccctcgacgcaagcagcacaacctgcagcatcgcccctcgccgttctgtccgcagcaccagctctgcctgctgcggctagctcatcagcgccgagcaaagctgctgccaaagcggccgagcagcagcaggttcggaccggccggctcgcgcgcgagctcgcgctcgtcctcgcgctcgtcctgtcggatggcttcctagcggccgatgctggcccgaccggctcgggcttcgagctgggaaagtggcttacgagacttgagtgtacgtcgctttttcgctcagcccagcggttgaggacagatcaaggagctgacccgccgctgacctgtggccccgcgacagacctgccgctcagcacacttctcaagcacccactcttccagccgatcccatcgccactcccaccgccagctgcgctcgcgaaggcgatccggacgtacgcacctgcgcttgacgcgcggatcgtgctcgacgaaccgaggagctttggcggccaacgcggccttaaagaaggcagcggcgggctcgagatcggacgggtcgacggtgctgccggcagggagaacgccacttggccggaccgggatgagaatctcgccagagaggtctacgtcgttcgtcgtcgtgtctgcatttgtgcggttcgcgcattcgctgatcagactgtacctttacttaggagtatctccccaccgcgctgcattcggccggcgcgctcctttccttcttcaacgccattctttcccagaatggtgtaccgaccgctagcggcccgccgctcgtctgcctgagcccaccgccgtaccgcaactactgccggctgacgttcagctcagccgcgaccgcgagagacttcctcgtcgactggagctggaccggctcgaaggaccgggcggcggccttcgcgtcgggcactcgctccaagacgccggctgctggcgacaatggcggagccgagcgcgagtcggctatcaaggccggcatgcgagcgctcggccaggccgactttgcaaagctcgagaaggagtacctcgcgctgctcgagtcgcgtcgaccgccttccacgccgccgtcgccgatccgcgcggtacctccgcatctgtcccagacttcgagaccaccgccagctgctgcgttggtggcgacgaccgcctcaggcggcgaaagcggcagcagcgctgggaggaccggccgctgctggcccgaacgaccgccggagtaccccgagggctgcgtcgtctttcttcgcgcgctcgacccggcaacgaataagacggcgctgaaggacgccgtcaaccacctgctcggccgcatcgctccgggtcgggccgacgccgtcgtcagttacgtcgactggctcaagggcgccgacacggtacgtcgcccgctctcgatgctcaaggactccctatactttcgtactgacagcccttcactgcgtctgccaggcacacattcgcttgccgcacagctcgctctcggccggcctcctcagccacctcgccgctgagccaacggtccatctccctttaagtgccggcgcaccctacctctctccgccagtcgccgccgtcaccgcgtcatcctcgtcttgggccccactttcagccgaggtcatccggggcgagcgcgagcggctctactggctcgctggagctgttcgcgaaatcggccgggccgaagccgtccgtgtcgctctcacctgggatagcagcgttgaggctaccggcgagggagcgagcgagggcgggaagcggaaggcggcaactgttgacgaagggggggtgcggaagaaggctgttcgccgggcttgagaccgatgcttcctcaccctggcggcgcttgctgcgtgtcgacctggttcaaaggaaagcgatgggcatggggcgcgatatggacgctgactagggttcaaggggaaggggaggcgagtctactaaacgtgtacaaggcagcgccaaatgcaagcggcgacgggcgcctaacagattaaagtgaaggcaggaacggaaactcggtctacttgccgtcgagcagcgaagcggtcgccgtcgtcgacgagccgctgccctcatgctcggcccctggagtggagtcggccgtgcggagcgagaagccgctgccgttaacgggcttgggtcggcgcttacgaccgcgctcgacctcggcctgctcctggcccaggccgtcggcctcgaggccttcagcgtcgtcagtgtagcgctcgccgacgggcatgttcaagcccgactccaagccggccggagggcgagcgaggcggatgagcgagaaggcggtgaaggcgcagaggagaacgaccaggcagaggacaaagacggtctttggccaggtccgggtcgtgagcgagtaggtgatgccgaagacaagcgggccgacgaccgtcgcaatcaccgcctggaggacggccatcgcgccaaagagccggcccgcgatgcgcgtgcttggcaggagcgcgagtgcgagcgacgacatagccgggccggcgccgcctccgaacggcgtcagcgccatcgcgacgaggaagccggtcgggcccgaggtgacaagaatgccgatgtaggcggcgacgtcgaaaaggagcgagaactggataacgcgcaggtcaaagcgggagtcgtgcagggcgcggtggcgagcgtgagggtcgaccgggacgacgccgtcgccggtcggcgacgaggcgcgcgagatgttggaccgagggacctttggcttgagccagcggacgatggctgaggtagatagatcgaggaagcgtcagtctttggtctttgagcaggacgagccgattcgtcgcacgcactcgggaggatgatgagcaggtggagggcgcgaatcgtgcccatcgcgctcagaaaaggaccgagctcggccggaccccagccaaactgcagctgaatgtactggaacttgatcgggaaggcgccctggaagcagagacggaagccgacgcagtgttagtgacggatcagagagagagaaggcgggtgtctggccgcacctgaaggcaaagcgagaaggagaagccgatggcgagcagcgtcaggttccagtttggccagcgccgagccttgttgaccgcttggttgtcgtccgaaccgtcggtaaagcttgggaggaagatctcgagcgggctgaggaacccaaatgcccggcggattaaccgcctcagggcgccgcgcgactggcggatcgtccggtccgacgtcaagcgcgaccagcccgaagcgttgacgtcgtcgacctcgtcttcgtcgtcagcagcctctccgcaaatggcgtcgctcgcgccctcccagcggcgctcggccgcatcgcgctccgacgctgcgagccggcggtcctcggcctgcttgacgagctggctccgtgcggcggtcgagagcgactcaggtaggaggaagaggacgacgaggaacatgcacgagtggaggaccgtcgaaaagtagaagacggcgaggacgtcgtgcgcccggcggatgatggccgagccgaggacgggaccaatcgcgaggccgagcatgagaacgcccatgatgcggctgtagatctgggcacgcgtgccgtcgggcgtgcagtcggcaatataggcgttgtttgtcgcgctcagcgtcggcatgccgccgagcaggccgtcaaagagcgggccgatgatgaggaaacggtagccgccagggacgacgtgcgggaacttagccgtgcagaggaagatgatgtcgctgaaggcaggcacggctttagtcaatcggcagacacgcgaagacaagcgcagaatcgagactcacccgaagatgatgccgcccatggcgaccgccatgacctttgtccggccgaagcggtcgctcaaccggccccaccagcccgtcgtgagcgcagcaagcacgccctgggtgatagtcatgatggtcgtgaactgggcggccgcccgctggacctcgggcgacttgcggcacttgagcgggtcgagtgggaggccgtcgagtacgagcaggagcccgccgccgttggggttgttgcctggcgcgacagtcacccggccgcggacgccatgtctgccaccacagggcgcagaggccgcgaagggcttgaccgccgagatatcgcccttgacgaccggctccgtcgtcggctggttcgggatcggccgaggtacactcggcagtgagggtgacgggtcgctagcgtagggtgggtcagaagcatcgttcgaggtcgtcgggtagtggatgaggctaggaagggcgcaaggatacagggtcagtgagacgttcctacaggaggaggcgaagtagtgacgccgccagcgcgcttctgaagcggagaagcgcaccaggcgagcgagttgtagatctcagccttgggcgcgattgagcagcccatcgagatggcatggccgacctgaatgagcagaagcctgcgtgatcgagagaggggggtcagcaaagaggttgcgttggcgcacagaaagtgggcaggtgctgaccagtacggattcggccgccgccaccacttgcggcccatgcggctctgctgacgctcgcgggcccagtgggcgctctcatcccgcccaccgtcgtcgtcgttggcccgctcggtcgcctcgggcgaggagtaagatggcggacctcctggcccatcggccgcgcgctctgagtgccggtggtcgttgtcgagccgatagaggagctcggcgacctgctcggccggcggctggaggacggcgccctcgggatcgagcgactcgaccgtcggcggcgggtgccaggcctggcgatgggctgaaggcgtgcgagatgaagaggaggaggaggctgggaggacagggcaacgagggtcagttgatagggacgcgcggtcggctcgcttccgcggctgccgacgtcagcttgggggggaggaggagcgcaggaggaggtagcacggaccgttggtggcagccggcgacggcttgggttggttagagacgaccatcgcgctgggtctggcagacggccgatcttgcttgagaaggagggaggaggatgacggtcaggagggacgttaggcgaggctgaactgcgaggcgacgacgcatgggccggccgagggcgattcggcgccgaagcggcggaagccgacgcacagcggatagagactccgtcatcgctgccggctgggcgtcctcaaggggatggtacatcgagggtagaaagggaagagctggatgttaaggggtcgtcagctcgacctgctcctgatgtcgctcgtccctggccgagctgtcggcggcggcggcgtcggcctgtcattgctgctgctgcggccggccgaaatgacggccacgcgacggcggccggccaaagaggggtcagtggctggcgcgacaggacgacctcagcccacgaacaggcacgccgccaaccagctcgggacgagctcgagaaacaggatgggctctcccaggtacgggctagtagagcccgcctgctgatcgacacccgacagcttcccagcgcctgctcgagcagtcgagctgtcgctcggtcgctcagcccgcccctgcttcacacgcgcgatgggacccccctctcgtcgccgagcaggttcctgacaggcctacccgcctcctctcgagctctgccagagagcggtgacgctgacggtctcctgtcgaccagcctcctcgatcgatcttctctgccttcgacaccctcgcagctcgcctcctccaaccagcgcgcacgatggccacctcctcgctgggcaccaagcgcttctcgctcggcggcctctcactcaccctcccttcccgccagtcaacgtcagcgaccgcgccctcctcgccttcccactttgacggcccttcctcgctccgctctccggcaaaggaacagctcctcggcccgcccttcagtttgccgacaccccgggcgaccagtcccagcgcctcctgcccaccctcgacagcgacgacgccggccggcgacgctcagacagccgggtcgatcatcgtccagcgcgacgagctctatcgacagctccgggcgctcgacagcctcctccagctgctggcgacgtaccacgccctcgccgggtcggtggcaaagaccgagcagaagctcgccaaggcctgcaccgacatcttgcccgtcggatctgcagcggcaggcggcactcggccgacaggtagcgccgaggtagtctgtgcgtctccctgctcttcgcctcccgggcgacatcgttagcctgacctttaccgatccctttcccttctctcgcgcagcgaacgcccttggttcaacgggcgagctctttcaccttctcagcggcgtctcggccaagcacgccaagtcgatcggcgccgtcctcggcccgctccaggacgcactcgtcaagcactcgaagaaggtcgcaaagctcgcccgcacgctcgagacgagcctcgccgagcgcgaggcaaaggtccggaagagcgcgggcgagctttgcgaccttcttcgagtgcttgacgagtgcgtcctggagcgggccgaggacgctcaggcgagggcgaagctgcggcgggcggggcaggggcgtgcgcgggaggtgttgtgatgacgtcccagacagtgaacgaagcagtcagcgattggtaacaagcgggaaggggaaaagggaaggacggacctgcagccggaacgggcgactcatgcgcagcaggggctagagggtgaaagtcacaaattccgtcagcttaccagactgaaaagaggtcctggcggagcgactcaccctgagccggaggagccgggtgctcgacggcggccgctgcaagcatacgctcgaggtcagctcggctttaagagagtgggagcgatgaggcaggacgtactctcagccgggcccagtgccgcctctgacgcagtcgggtgcgcggcagcctccgcctcagcgggcgaagcttcggcagctgaagaacagaaagcgtaagagccactgatcagcgggcctgcgagccgggtagagggtgaggaagcatgagggactactgacgagcggtgtgctcagcggggggaggagcggctccgcccttagtgtcggccgaagcagttgcgctagcctcggcagcgagggcgcctgacgattgagatcgaccggcagcgtcagcgatcgcgcgccatctggtgtcggcggaggagactgactctcagcagcagctggcgcgacggtcgggcaaacgttgccggcacctgaataaaagagcggccgggcggtcagcagcgtgtccgaacagcgcgcggcactctcgcccatgggatggggggggacgaaccgtcgacggtgactgtctctgtaacggtgactgcatgaacaagggccactcaagggtcagccctcaggtgaaggtgacgagcggcaggaggatggtagacgacggaccagtcgcggcatccgcgatagcggccgaagcggcagtctcggcaggggccgtcgcgcccgatgatactgcgactgaagccgtcgcgctctccacagcggcatcggcaacagcagcagacgcggtggcggcagcggcgaaggtcgcagtggcgtggacagcaacgtgcgcaactatcaaaaagacgagagagatctcagcgctcgaccgctggcgaagagggtggcagtggggaggggctgactctggtcggccgggacgtcggcggcgggaatttctgcggaggcgaagcctggtcaaggggatatgcgagggttctggtggatgggaagggactgaccgtcgagattggcgtcgcctgcgggacatcgaagcagcgcaggaggtaagctttaagtctcagggccaaaaccgaacagtgaaccgaccctcagcgtatgctccagcagcctgcgcgtgccctatcccccgtccgggccggccccggcccttcgccaggccaccaccgaggatcgccgacaggtcgagctttgggcgtcgtccgccggtgcggccgcgcccgtcgccgcgctcgacaaggaccgggagcggaagcgggagcggctgcggttcgggccggacgtcggttgcgggcgagagagggtgtgcagaggcgttgagggagaggaagaggatggaggaggcaaagaggacgaggagggaggacgaagaggcgtgcatggtcggtcgtctttccctccacggggcgggtcagtcggagcgatgcgatgaagagcggcacgggttgggcggctcacgtaaagagaagcggcgtagagactgggcggtgcggaggacggtaggtgtgcgctcggccagcgaagcgcgcgaaggggggcagagaaggggaggagaaggggagatgggagttgagagaaggtagcgagccccctgccagccggcttttcatagcgcgggatgcaggaggcaccggtcaaagcccggatcggaggccgtcttgagctaagggagatcggagggtgaagatgggagggagagaggggtgattggggtgggaggtgcctggcgtgcgtcagcttgtggcgagggggcgagaggcaaagaggcacgctcgagctcggcttgttaagcatctcgccgcctggaagagtggctcgtcagcaagagatcgagcgattgattctcctttctcgatatcagccatccggtctgctgcttgatggtgatggtggtggtggttgtggtggtggttttggtggtgtgatgggcttgaaacaaggcccccttgatgagtttccctcacagcagtagaacacgacagccgccgagattgtccattcagcgccgaggggtaagctcagctttttagacagccttcagccgtcctgccgtatgtagacagctggctggctcttgctctctggtccttgcggtcgccgactgacccagcgatgcaggcacgcccgggcgggcgggcctgctgcgcggccgatcgaccgagcccttgtcctcgacctcctccagcccttggcccctcgacgccgacaccaaccagcactcccagtcgatcacccgcccgctcgcacgcgatggagatgctcaagctcgacctgctcgcctctctcccggcctacacgcccgcggtcgaggagcgcttcctgcgcgcgctcggccagctcgtcgacgcccggccaacggcggtccatccgtctgaccgggcgaagctcctcagctggctcatcgagggcctctcaaaaagcggctggagcaaagtcggtacgtccagcgagcgtctactgggctggcgggaacgctgcacgacgctttctctccccatttctcttgccggagctgatcgaaggccgtcggcccctctgcgtctatccgagcaagtcgccctcaaggccgtcgaggcgatcaaagggctcggccgcaacccgctaggctccgaggtgctagccaccccgtccgtgcgtctctcgacctcctcccacgcccttcgacccgccctgcggccgtcgaactgactcctcttcgtcctcgcgctcgagctcttgcaggcactcgagacgctcgtccgctgcgccgccctcccctcgccagcgccgtcgccgtcgccacctctttcatcccctctccgtcccttactgcccgccagccctccacgcttgctctcctcaaccccgaagccgtcctcgccagccccagcaggcccgtcagcggctggcccaccaccggcacgcacgttcggcgacgcgctttccgatggagcgctgcgcgtcctcgccaacgtctcgctcctgcacgcccccgcccgaccccttctgctcacgctcggcgttggcgatgcgctcgttgctggtctgaggtcggtcgatcagagtgcgcagggcgtgaaggacagaggcgatctggtgttcgtctctgcgaggatcttgttccttttgacggtcgcgggaggacaaccgcttgtggatctcgtcgagaaggccgacctgcgttcgctcctcgtcacggtccgttccctggctctcatgcccctcccatccgtcaaactgacgttcgtggcccgtggccgtctctccagctcctaagcgacccgccccgcgtcgagcagctcgacccgctccccgagctcctcaagctcgcctacaacgtcctctcgctgtacccctgtctctcagcgatgcgtgtccggctcgacgaggctggacgggtgtgggaggggatcgaggaggagcgtgacgaggggccggctgccgggggtggagctggcgagtggtgggacgagcgactcgacccgtgcgtcgtcgtcatctgtttgagctcgactccgaccgatctagcaggcagagactgatactttggaggactgtcttgaaccaggcttctcgccccgcttcttgccatcctcgccgcccagccgccgcctctggccctccctttcgccccgacgctcgcacagacgctcgcgtgcctcctccccttccctccagcagcgtccgccccgctccttaccgccaaacaccggacgctcctcctcgccgtctgggagcgcgcgtcagcgccgtttgccctcgcccacgcgcacgccgctgaccaccagcagccggggggaacggacgcaaacgcggacggcgtcgagcgcgagatgcccgtcttggcgctcgtcctcgctcgacttgctagcgtcgatgctttccggcacgagatctttccagccttcttcccggccgacctgtccgtcacacccccccccccggccttcctctctcgacatttctcctcacggcgcacgcaatgactgacacagagattgctctccgcccgcccacatgcacgaagcgaccgctcggccggctcggcgccgctgcacgaccggccggggcacctcggcgcggcgatccggctcatgcgcgctccggacgagatgcaccagacgcgggaggccgtcggcgagctccttttcgcgctcgctggaagagaccgtacgtctctggcgtttgctttccaggagcgggtcctatgaggctctgatggagacaagctgacgacgggacggacgggctcttggtctccgttagcgaacaggatgtgcgagctcgtcggatacggcaacgccgccggcttcctgctcacaaagggcttctctgcgccatccgagcctgccgctgctactccctcttcctcgtcgtcgacgtctgggccgaccgccaatgcccacgtcgtcagccccatgacggcgctcgaagccgacccctcaacgccgatgcacgatccggatatgaccgaggccgacaaggagcgcgaggccgagaggctctttgtcctgtttgagcgaatcaggcggaaccccgccgtttcgcttggtggaggcgaaggggcggacggcaagctagacccggtcaggagcgcggttgagagcggccggtttgaggcgatggacgaaagcgtggggctttccttccctcgtctgcttctctcctgactgtgtgctaacattgcccaccctctctttctctcctgcgatgccaaaaaccagaccgaagctgaacgccagcggctcgacgagcaggacgcggcggacgaggcagaggcgttgcgcgaggtgcgggccgtgcgcgcccggcggggcctgggtgaggctgccgagtgagcgggtgagagatggagtcgggagcggtcggtgcgatacctgtcgatgcggatgataccctttgcttcggtctgtggtcgtcctgtgtgaggaacgaggaggtggacgtacgtcccggcgagtcgcccgcacgagaaagggggagggaggctctggtgtgggcaagcgcgcgccttgctcctcgaacgtccaacttgccgcctcctccgcctcctcttttctctctcaatcacaccccgctctcagctctccaacatcttgcctgccgctatggacgccgcctcctcgacccagggcgggacgccgccggccacgtccgcgagcaaggccgcgcgaatcggccgcggcaaccaggcgttcagcagcaagatcgcccgcgactcggacacgcagtcggtctcttcttctcagaaatatggctcatgaatgggctgagctgagctgacgagcggcgggacctttgcgctggctaccaaggaagtacaagatcaagtacaaggacctgaaggtgcgatggccgacgttcgaccctgggggtcctcggggcgagcgagctcgagctctcttgctgcagctgctgatggggtccgtcctcccctcctgctctgaccggcccatcgcaggtcaaggtccgcgagattgagagggtgcgtcaaggttgagagcgctggctgtctaccttggcaggcgcgctgactcgcttgcccatgatctccaggacaacgacaagctcgcgctccgcctcctcaaggccaagcgcgacatccaacgcgtccggctcgagcgagcgtgcgtctctggctgccctctgcttgactcctctcggctggagaatctttgagcgggcttaaaagctgaccagcatcggctcgcctcacagcatcatcttcgagcgactggctatcccgatagagagcgagccgccggcccgctcgccgagcccgctatcagctgccgcggccgttcagagcgaggccgtcagtcagcaggagcaggaccagcagtatcagcagcagcaacagaaccagccgatggaagctcagcagcaacagcagcagcaacagccatatcaggcgcagcaacaggcgtacgatccggcagcgctcacccagggctcacactgagcgttgccagccagccacgcctttcaccgcatcgtcacccgtgacagcgacactggaggacgagctgcttactaccgcgctcatgcgcatcctgatcgacccaggtacgcaccgcgtagtcctgttcgggcgcttcaatggttgccggccgcctctcgcaccttgcgacttgtcggcgcagggcggatcccatgcacacctgtctctttgctctcagtgtgtgtggcgagagacgaaatcgccgaccacccgagaattcagacattcagacatatcattcaagagactcccctgtttcagacctagggcgagcgcgtgccgttctgcagcgcgtgatgctgctcttcccttggaagatgggcttgcgggccggccgaattgtagtccaagtggacgaagcaacgtgcgacgccgtcgagcgcctcgattgccgtctgcatgacctctctgcgaagtcgaacgcagcgggtcagtctgtgttgaagtcgccaagcggttaaagccgcagacgtacccgacgtcgtgcgcgagatggaggctcgtgtctggagggagacagacgtcaacctcgacgatgaggtcgtcgccggcgtgatatacctcgatgttgctgacgtgttcgatccagttgaactgtcggaaggcgcgtcgaggtcagcgcgcctcgctctcggtcacagaagcggaaggcagaacgtacgcgcgagaccaggtagaggacgaccgagaagcgctcgttgtcggccactcgtccagagaggttgacaaagttctcgaagagcgtctggcaaagcgggtcgacgagtggtcagcgtctgcagaccgcgagggagcggagtaggcacgactcaccttgcaccattggaagatgacgtagagcgagagcagcgcaccgccgatcgggtcgagctgcttgatcctgaactgagcgccgagccacttcgaaaagggagaaacaaggccgaaagaaatgagctgacgcaagcgaacagaatggcaagagaggcgcgcgcacaggaaagaccagcgaggctgtgttaaagtagctgttgagtcgaaagtcgagtcagctgaggcactggcatcgcctcaagaagcacgtccagctctcacacgtcgttaatggcgtcctgcgcaagtctgggcaggatgcgatcgagcggagggtcagttgagtgccacgcagtcgacgtgaccctcgcgagggcacgtacgctgctacgccgctgtccttcatgctccgcgtgacgagaaagatgaagagcttgatgccgattgtgaagaggatgaccttgtagaaaactgacgttagtaaaggttaagctcaggcaggcaaagccttggacgcacccctttgccgaaccagctgaggtcgataatctcgctctcgcttttcttgtcgacgagtcgcgtcaccgactcgaggaacacctgtgagaaagcggtaatctgcaggacggcaaagataaggatgcccaggggctggaagcgcctcttgccagcggggaattgccgctgcgaagggtctggatgtcagctgttgcccgcttcgcctgctacgcatatcgacagtagactcacgcgtctactgcgcccagaggcggcgcgcgaggtgatccagatgatggcggtcgacaagacatccagcgccgagtcgagcgcacttgcgaagagcgacagcgagtcggacgcgaggctcgcgaccgccttgattccaagcagaagcaggttgacgccgatgtttactggcagcacgcgagcgacagcgtctgtcagcccgccgtcggccaaagagttcacaaggacgtacgattcagaccccagcgctcccagcgttcgtcacgtcgcgcagccggtccgccgcctgcgtcatctgcgtacgacgctccgagcagacgctcctgctcaccggcctcgccgccgccgtcgattctgatctcgacctcgtgcgagtgtccatggctgtccgactgccgactgctgccgtcgagcgtaccgtagggcttgtgctgcggctccctccgctgaaacgtgtgcaagacgtcgcgaggcaggctcgacgcgagcacctggtcgacctcgacgaacgaagccatcagctccgactgcttgcggtagtaacggcggagtgccttgtccttcaacgagcgcagacactggtcgttgatcgctatccgggcctcccagtcgtctgtcgcagggcggatcattctacgttcgagacagagccgtcagttgtcgaagccggccgcagaggctcgctcgggacagaggcctgcgcagctcaaccacgcaccctttgaggtcgtccatcgtgcactggcgcacttgatgacctgctcccggtctgcgagacatcctgctagtatattgagctcctccgggcgagaaaatgggcttggccgaggtttctggtcgtgtcggagggtcgtcgctctgggctgagcggccgtcgccgccgggccgccttcgtttcgtgagctcgccggcggtgctccttgccctcaagcttccatctcgccccgtcctctgttgccctcatagcgttacagcgaacatccccgagcggtccacagtcgaccaccgtcacgatctctgaccaggctctcgccacatgaatggccgcagcgggtcctcgtccgctgcagctgggccctcgagcccacagcgcggtgcgggtgccggccatcgctcggacctggacctcgcacacgacatggccagctcttctccggcctcagcacatccgctgtccttgaccaggtcagcgctagaggttccgcttgacgagctagccggaccaagcactcgcccggctctcgagcgacggacgaccgcgaccgagactgcagcctcgtccggcgacccgccgcatgctgcagcgcaggacgccggacgccagatgccggcgaccgaaggcttgcgacgtagatcgctcgccgacggcagcagtggcagtaggaagggcaaagagcgagagctggtgtcggcgacgggcgataccgagaatgctgtcgaggtgctcgtccatcaggtgcgtcctatgggccgggggggggcggggcgccatgctgaacatcccatcaccggcttcctccgaccagctctcgtcgacagactctctgccccggatagcgctccagtacggtatcgacgtgcgtcgtctgttgtcgcctgctgcagctggcctcgctgataaccttcgtgcatcgcctcagctcgccgtcctgcgcaaaacgaacaagctgtggacgtccgactcgctgcacgtcaggaggacgctctacatcccactctcggcctgccatctccgcgaggagctcgttcgtgggccggccgatgacgaggtcaccttgctgcagccggaagcagggcctcgtcccgacccagtcagggacgcgctcgacggcgcgcagtgcacgccgccgcgatcgtctcactcgcgagctaccacgactccgaacctcgcgctcgagggcgcctcgccagaggactttgacgggcaggacaatccgtggcttctcgacgggaccaacgtctcttacgcggccgatcatttcgccgacagtctcgcttcactcatgccaggcctgccgtcatccgcagtctcatcgtcctcgccatcgccggcgcctccaacaccacctccccggacatcacgcacgctcaaggtcgccctcatcgaccgcaaggatctctcctttttcccccgctcagcgccgtcttcgggccgggcctcgctcgactcgagtctgatgcatctcaagcggtcgacgccagcgacgcctgcgatagtcggccgtcgcaggccatcttcgaccacgacgcacagcccgtcgctctcgcgcaagatctccaacctttttcttgacgtcccggcgacgctcggtctccccggcccggcgtcaccgacctccccggtgcttcccgcgggaggggcgttctttgcaaatggtcgcccgtcgctcaacggtcggcagaggtcggcctccgactacgggcgcggcacgtcgacatcctcgaggacgagtttcgacctcggctcctccccgccatcggcagagcacgtcgaactgtccgctttcgcccctccgccactgccgccggggcggaagaccgactggctctcgactgccggaggggcagcgctgtcagacggtaccatccgccagcagctcgcacataagcagccgatgatgggcgttcgcgactcgcgccagaacatggctggccgggtggtcggcgatggccttggcaacggccgcatcaaagacgtctggatcgggtgagcagctctggacagatgtacgtacgtcagacgtcagcgagagctgctccgcctgctgacaggttgccttgcgtctgcagtctattcattaccgcccgccgcccaggacagcgctcactttaggtcggtcgtcttgccggtcaattttctgtcagcacacgcagtccttcgtcgacgcagacccaccaggatcagccggtccatcgccaggctctctaatcgacttgcctgtgacttgcctgaccttttgtcgcttgtaacggcagccgcgactctctcgctcggcagggatggtgacgtaatccctcctcgtgcgcctgaagctgtcaaacttcgacgggcatggaccccgacgaaccttccaccgccttgctctctagacatgcatctcgcgaaggcagtttcagccatgcgtactggtctcccacgaagggatgagcgacgaagagatcggaggggacgactgggctctcggcttcgcccggccggccgcctcgggcgtcgaaacggggaccccggcagctgcccgtgaacgccctgtcgcctgccctcgctgctccttgacctccaacaccctgccagccatgtcgtctggtcgcccaccttcgccgactgccgacgctcggccggccaaacgcaagcggcgtgcgctctcgtgtaacgagtgcatcaggcggaagacgcgggtgagctcgcggcccgggtacctcgcccgacctcctgatctcgatgctcggagacgcttaccgaccggtgtcgctgtctgcccatagtgctctgcgctcggtacggtcccatgcgaggcctgcgtgaagcgtggcagaccggacgattgcgtctgggagggcatggccgagaaggatctcaacctgccgggcgtgcctgcggctccggcggcctcgaggtgagccctaagtcgctctccttgtccccagtccaggaagctaacctgctttcatgacgccgacagctcatccggcgcagctgagctggctgctctccgagccgaggtacaggagctcaaggctgccttccactcgcacctcgcccagtgccggcctccgccgcctccgacgctcctctcgctcgctccgccgccgcctgccgcgtcgtccctggcactgccgccgctcggctcgattccttcggcctcgacgcccggctcgacgtcatctggcggcggtgggacgtccactgcgtcttggtcgctgccgacggtgtccgagatggatcgtaaggtcgagacggccgtcgcagggctcgaggagctcgtcaccgctggcggcgctgccctccggccagagtcacggatggtctttcacaaccaggctgccacaacatcgtcggcctcgacgagtccttcgtcaatggcgacgccaatcgtcacgccgccgacagtcctcagaacggtcctcaagcccagtccggcctcgcacttgccggccattctcgacagcgcgatgcgcgacgacgctctctgggacagtatcagctcggtcgtgcctgtcccgcagacgagccaggtccttgtcgatgcctacctcgcctcaccgtaccacaagagctggcacgtgagtctcgagcggggcaggcgatctaggtgccagggcttccgcgctgatacccgcacctcgctaggcgttcatcgggccgacattcatctgcgagcaccatgccttctgcgccgatagctcaccgctgcgctatcgcgggattgatccgtgttggatcgcgctctacttgatggtgtgctctcgaagagtcgctcgtctaataggcggcgcgtctgacgcatacttctcgccccgcaggtgcttgcgtttggcatcaagtcgctctcactcagcgacgtcactcgcatctggccacgttacgatctgcaagaggctgcccgtctcccgcgagcactgtacgaggcgtcgatgctcgcgctcaagatcggccgatacgacgcccagcctcaggtccggcacatccaggtgcgcccagcctcgatcttcttcccccgcccgtccaatacttactttctgccgccccttctgtagaccgtcatgctttacgtcccgttcctgttccactttggtccggcctcggacgggacggcggccatgtcgcacatctcctctgccctttcgaccctccagtggctcgggctcgaccggcttgccaacgacttctcacgtttgtcgaaggacgacccggcgctgcgggatcttcacccagttgcggcctttgagctcgtcaaggttctcgtccattcattctgcctccttgacggctcgatcagcaaacgctacggcctctgccggctgggcgagagcttgggcggtggtgcgttacttgacacttccgcttcgcagggcaggcacctgactgaaacaacgtgcttcgtgaaacagcctccgcgaccgtccttccgctatactggaacgatgccgagctcatcgccggccggctaagccacgagccggccacgcgctgggtcgattcgtcgtcggccagggtgaatcctcttctctcgtacgcgattcagaggtgttgctgacccctgcgcgatgattgacttagatcggctcgctctttggcaccgagaaccggcgcttcctgaaagagtgcgacagctacgcccgtgagtccgcttgtgcgacgaatgatgcgggtcggacaactactgacaccctcagctaccgctcatgcagaggatccgacaatcgagaccgtcatgcggtacgaccatggcctgcggagcgtcatggcgcagatcccccggctcgaaaatgagccgcccggcgtcgtcaactgtgagtcgaagcggaacttcctcgtcctccggcaagtcgctgctaatgtcgccccctatccaccaccgcctctcgcagtcatgcaggtgacgatcctgacgagcatctgcaaccgcctgctccgcgcccaccggccatacatggtccgcggctacaccgacgaacgcttctgctacagccggtcggccgccctcgacagcgcgcggacaatcattgcctcgcagcggtacatgatggcctgtccgcaatatcggccgacgtgcgtccagcagatcaaggcagacggcctccgaagtcgtcaccgccccttgctgacattgacctcatcgcaacagattcgtcaaccgctggatcctcggcgccgcctttgtcgtcgccatcgacagcgccatcgacctcggaggatcgtccgactcgtccgagcggcgttcaccagccgacaagcggcgcgacatcacctcggcgctcgagatgttccgccagccgaacccatcggatccgacgccagacgtgtcagaccaatgcgcacggacggttcaggccttgctcgagacgctcgggcgctggcacaaggccaaggctcggggcgagacgcctggcgggccgagcggggccgacctcggcggcttcttgcagcaggtcaagtactcgctcgagcactttactggtccgtgcttccctgactggcactcgtgtgcgttgcgcaggcgctgattgacccccttgcccgctgcgtcagacggcaaccgggactcgcagagtatctcgagcccgcagctggcgagcatccagaacccggcgcccgagccggccaactttgactggtcgtccctgctcttcaacgtcggcgccctcccggacgggatgaatctcgagcaggcgacctggagcttccagctcgagtgaggtgatgacgaccgacgctcgcagccgtacacgagcttgacgacacgcatgacccttgacctttaagacctcgaccggtcctttcctgtcagatgggacatgcgatccagcgcttataccgacatcttcatctcgattttgctcatcctgaagagcgaagagaaggggctgtcagccgtcggtagggcccagggactgtggtgagtgacggcgactcacggcttgtagccgacgacctcaaagtcttcggttcggaagccgtcgatgccggccgcccggagctcggcttcgggccgcgtccagcgcagcgtcgggaatggcctcggctcgcggacgatctgctcctggagcggagcgacgtggtcggcatagacgtgggcgtcgcccatctggaggataaactcgtgcggctcgcagtcggtcaagagagcgaccatgtgcgtcaggagcgcgtacgacgcgatgttgaagggcacgccgaggccgaggtcgcacgaccgctggtacatcatgcacgagagctttggccgcgggttcggctcggccgcggagggcgcggaagggagggtgacgaagaactggcagaacatgtggcacggcgggagggccatcaggtggaggtcggccgggttccaggcgctcaggaggatgcgccggtcggtcgggtcctccttgattttgcggatgacctcggcgagctggtcgacgccctggccgctgtagtcagtctcggcgtcgacatagctcgcgccgaagtgccgccactggaagccgtagacggggccgaggtcgccctctttgcgctggccgagcccgcgcgaggcgaggaacgcggccgaaccgttgccatcccaaatgtggatcccttttgcagcgagcggcagggacgacgtcgagcccgagatgaaccagaggagctcctgcgagacgcacagcaagaaggtcagacattggtgactgggaacgatgggcggcggcgacggctcgcacctcgagcacgccgcggaagaagacgcgcttggtcgtcagcagcggcagcgcgccgccggcgagcgagaagcgaagtgctggcggtgcaaagagggcgatcgtgcctgtgcctgtccgatcaggccggtgctgaccggtcgcgatgaccgtcttgatgaggttgaggtattggttctcctcatgcggcgtcgtctgagagggcaggaggtgggaggacaggcgtcactctcgggtcagcctgggcgacgagctgaaggtaaaacactcggacacgcacagtctctcccgaaacgccgtttgctaccggcgtgtctgctgttgctgaggccgaggtcatggtcgttgcgcaggaggagacggttgagaggaggaaggggcaatgctgtcggacgggctacagacgagctcattcagcgagcgagcgacgacgcgtcggaccggccgaggaaaagcctccgaccgaccgctgggcgcagcaccgatgtcgaccgccacgctcctcctcgagcatgctttggaaggcagtgtgagctggcgagatcctgagtgagtgtaggaccgccttcgagagaggctggttgttggagaaaaccctgctgaggctcgacggacagccttccctgggcggcgctcttgcggcgcgtcgcctgagcgggccgcggtggcggatcgacgacgcgacggccctgcgagctcgaccagagacgaccaccctcgcctcttctctgagcggtctgcgacctcaacggctcgccatatccggtccaggacccgctcaccgacaagagcgactcgcactgaggtgtgtcgctcggccgatcgtacccgtccgagctcccgacgcgacgcgacgtgccctgacctccactcgtactccagcttgatccgcctctagctggctcctactcaaaagatctacagcgtaggcgcaccccagaacaaccgtcggtttgtcaaactccgttgatacgtgagctggccatcatccagctcgccgggccagatgccgtccgagcgccagcaggaggcaccgggcccgacctggctgtcggcctcccaccggtcgacaccaatgcctcccgccgagcgcacctcgcgcgggccgggagccaagatcactggtcggaaagcctttcaccaggccaagcaaacgaatctcttctcgttctacggcaaggagccagcggcgccggctggagaggccacaggcaggggcagggacagccgcgcctcgtcggctcgagttactgcgaagggcaagggaagagagctctcgtcctcttcctcggacgacgccggtgatgcctcgagtcggccaccggcccgtaaaaaggctcgggcctcggagccgctccctcagaccgccttgtgcttgtcaaggcggtcggaatcagctgcgcccatcgacgcttcgagcagtcggcaggccgccccacctccagccttgagacgtcctcgtctatcagcgccggtcacaggcggttcggtcgacccgttcgctctgccttcaagcaccgaaccttctcgccggaagggccgcttgacgcatacggcctcaccgcctccgccagctgcaatcaagcgcgagcggctcgagcagctgcgcggactcgcggaggacgacggctactcctcccctgctgacctcctgccaaccaatccagtcaagagagagcggtccgggccgtctgatgaagactaccaggacgcaagcatcgagcaccagcgtcgacggcgaaaggcgctactcgtcaaggccgagccggcgtctctcgtccgctccgagccggcttcaataggtgacgcctgtcctccctcccaagagtctgaggcgtacgacgaggaggacccaaacgatcaagttggggccatgctggctggtcagccgtcgtaccatcggccgacgtcgctcctctccgagtcgctcgcaccctacctcccagcctcgtacccttcgccccagcggcttccgcagcacgttgtcgacgacctgctctccatcggccttccctttggagggaccaacggccgcgaaaagttcctacgccggcctcggatgccctgggagacggacgaggcgtgggaggcccggcaggccgagctccgccagtgggaggtcgacgagcgcttgcgcaaggagcgtgccgcacgaccgctcgaacctccagccaggcagccgcaggtcgacgaagagccgggcaggaggctctcgaatgatttcgagcgcctcgtcgctgaaggcgaggcgagcgagcccgacacctactttgccggcgggccgaaaaagctccattggccaaagccgccaatcgttccgctgaaagcacccctggttgtcgacggcccattcggtcctcgaccgccggcactctcagccccggtgaagccgacgaggccggctgccggacggacacgcatcatcgcgtccccgacccggagctcgccctcgcgcgcgtcctctacgtcgcccgtcaaggagccgtcgctgctgccaggagaggagagctacacgctgccagcaacccatccttactcgcggccgtttatcccgacggcgcctggcgcactcggccctgcgccgtcagccctctcgctccatcggtccgaagcgagcggcggcgagggcagctacactgtcctcgactcgcatcgctttggccgacgacctcaggcaatgtcacaaggagctcctgccaccgtccaggctggaccgtcggctctcatggggccgacctcgcccgggcgagactcgcagccccagcctccgaaggctgtcccgcgccggctcactgaagaagaggagacgtcggtcatccttgagatcgactggtcgcgggcctccgcaagccccgagcgactagcatcccctcttcctcagctcggatcgactggggctgcagctgcgttccgggaggatctcgacgtcgtgccaagctcgcagaccgaagaggcgccctcgctgttcgcccccatgagctcggcgacaggccaagcaggtcctgggactcgtacgcccggcccgtctccggctcgcatcctcgtccttgccagtcaggagaccgcccagcagtctccgcttaagcagtcgacgcctcgccggcgtggacttgccgcctcccaaccctccctccggagtggcggtgaagcactcactccgtcacgccggctcgccaactcaccgtcgcagtcatcgccctcacgactcgcttcagttgtgccagccagtcctttccagcagtcgagcgcggacaaggccaatccttcgccggcacgatcgctcgttttgacgacgccgacgcacggccggacgcacgccagcgaggacaatatcgtcccgacgtcggtcgcggccgagcgcccagagaacgatctcatgctcgtctggcaacgagcaaaggcccaagtcgctgccgacaagagcgcaagtccaacgccgaccaggaagggtgccagagctgcggtgagttgtcagctgcgtccaacggtattatccttgctctactgacgtctccgggctatcttacagggacgcctgccgcctgcatcggttaggaggccctctgccgtagccgtcacgagcaagacgcgtccgaagcctcgcatgtcttggcctgtctggaccggggtcggcctcatcgacgcagacgcttcgatccccacaggcgacgacgaccacgacgatgagctcgccggggttggcgaggcagcgaacagagcttccctcttggccgcgagcaagccgctcgcgcaggacagcctcctccagcacggctttggacgatccgttgtctgcgcgcctcggccgccctcgcccgagaccgcggttcccctcgaggaggccatcaccgatgaggaggacgaggccgacgtacccgtattcgacgactcggttgtcccctcaagccagagtctcgccccgctcggctggggcgtccgacgctacggcgacgtgccggccagcggcaagaaggttgcccctatcccgagcccgcccccaagggctgtcttcgctcgaccgtcgcgctacaagccgccccgttcgcccgtcaaggtcgcctttgcgcacgacctcacgcgtatcgccgcctcgaaaacccggtcgccgacgccgtcgccgcgcaaggccgaaaccgccgacccggacgtcacgctcgtcaagttgtcgcaacctcaacggtcgtcggatccctcgacgtcagaagacgaggaggacgaggtcgatgccgacgtcacactcctcgcgccgccgccgttcgacctcagcttcctctctcaaggcaccgtgccagactcgcagccggctacggtcgaacggcggtcgtcgccagaactgatgccaccgccgtcgtcgtcgtcgcggcccccgctccgcgctctgctgcaggccgagtcgacgaactacgaatggcttcggagcagcagtgggagctcaggcagtaccgggctcgacccgggccttgaaaccctgctctagccgtgcctttgcattaacgatgacccgtccgaccccacgctgcgacgacggctcctgttgggctgacggggggaaggaatctgcgtcacggcatgctcatcgcttgccgctaacgacggcttcaaccgcgccctggacggcgcctcgcagaccacgggcgacgaggcccgagaggccctgcgcgagacccttgacgccctcggcgacctgggctgcttgcgcaatgccgtcggcaagtgtccgcggcggaagcggggaccgcagctcgtgcatcggcgtgccgccggactctgcaaagagatgcagcggggcgtgatcagcgacccattgagctccctcgcgcgcgaggcagttagaacgcacggcggatgagcatatccttgatgcccggcagctcctcgagcacctcgacgccggtcccgcggatccactttacgagcgggttgtcccagcggtatatccgctcgagcgagtcagtcgacgtcaggacggcctgattgcgcgcccaagcctccttctcatacgacttgagcgagccctcgctcccgaggtcgccgccaacctcgaccgcgcgctcgatcgcgcgcatcagcatccggccgtcgtggaggcccatgttgaggcccatgccggcgtgcgggtggaccgtgtgagcggcgtcgccgacgagggcgacccggggcgcaatgtagcgctcggcgtgcgagtagaagagcggaaaagaggccgtcgtccccggctggagcgtctggatctgaggcgggacgaggtgcgcgtccttgggcgggatgccgaggtgcgagggcggcgtaacggacgagagggccgagtgagggaggatcgacgacgaccgctcgagcatctcgatcgatgcgaggagctcggcgtggtcgagtgccggctccgggaagagcggggccgtaccggcagatgccggcttgacttcggtcacgggcgcgctcgggggcgaggcgcggtaccgggcgaggacgcggccgagcaggtgctggatcgcatgctcgggcagccggaagcaggcgttgatgaggaggacgaggctgtcttccggcagcgtccggacggcgtcgctcatctcccagtcgcggaggtgccaggccaggctcccctgcgtctcgcccatcgggaggaaagcaagcggcccggttggcaggaagcgctggtaggccgtccggcgcgggccgtgcgggaacggcgcgtagggcgtgtgagtgatgcacgagacgattgtcttggtctgatacgaatggccggtcgagccgatgccggcaaaggcccggacggggctgcgcgggccgtcggcgccgatcagcaatcgggtccggagccgctcgccgttcgagagggcgagcgtcggatagtcggcagggccgttgacgagctcgatcgactcgaccttgacgcccgcccggacagtcgagttggggagcgtcggcgcaagctcagagtggagccggaggagcgaccgctgaaggttgaggttctcgaggagggtcgacatgcccgagaccgatggcgacgtgagtgtcagtcgcggcggcgacatggacgccgtgtcccagacctaaggaggagttagaggtcgagctcgtcagcgggtgcgcctggtccgacccacgagagaccagagagccccgggctgatcgaggaagctggaccgacctgcatctcctcaatcgcgcctgtccttgctgcattgacgtgcttccagctgccgatctctgccaagaggtcgagaaaaggtgataccagtcagctcgatgacggcgtgagcaggcaatggcgggggacgcgttgcgggcgtgacggaacgaaccctcgaggaagcgtcggttgtcgttagtgaccgagctgacgcggttggtccagacgccctcggtctctgaccagtgctcaacctttgcgaggtcgccggcctcgacgagcgtcgtccgaaggtgggccgtcacgggcgaccgggcgagcgaggcgaggagcgagagtccagccgggccgccgccgatgatcgtaatgtcctgctcgagaggaggcctcgcgccgatggccgtcgcaagcgtccggcgcgagcacgccggtggcaggcgccttgcgagctggagcgagagcatgcttggagggagtggcgggagggagtggcgggagggaggaagaggtggtgagggtaagagggtgtgggccagctcggatcgggcacagcggcgatccgtttcgctgggcgcagcagccccccctcctgatgctgttctccttgagtcaggagggaggaggacgacgcggcatgtataagctacgtcctgccgtgcgtgggagggggagagaggaaaacaactagcccagagcgtgaatagatgaggtcgaagagagaaaggattacaagggaggggaggagtaagtgtgggcggcggtggaccctggcgatgcggcgggagacggaatgcgtgggagaaagtgtgggtgggacatggacaaaggcgtgaaggggtcggtcgatacgagcgggagaagagcagatgaagagaagcgccgaccagcggtggtcgggttatagaaaaagagaacgtggcttgaaggcggtttctaccgccgctcaagatcggccgccttcggagtgtcgcctgcctgcggcagctggccgcgtggcgtgctgtcaagcatgacgctctcgatgctctggaggctcggccggcagccttcgagcaccgccggcctctggtcgtcgagccggacctcctcgagctgctgggcgagcgcctcgggcccggcgatcgagacgttggcctgcgtctcggggtcgacgtgggcgtcgtcaatcggcgacggcggccggtcgaccggcgcctggccttttgtcggcggtggcgaagcgagcgcgggcgaggcgagcggaaccggcgtcggctgagtgacgttgatcgagggtccggcggccgagggcacgaccggcgtcgccatcccctccaaggttggcggcgtcgctgtgcccgaaggtgggaccgacgacgacgaccgcggcggccggcgctcgatccggagccgtgagcgcaagagctttgcctgagtgtcgaagccacgcgtcgtatcgctcgtctccgacttgtcggccccgcgccaacgccgccagccgtcaaagtctgtccagacggaaaggggggctctgttagcaggctttctcggacggatactgttgacaggggacgacgcaccgatgagggcttgcatgcagccccactcgacaatcttcttctcgagccacttgagcgagacgggcttggtgagaaagtcgttgcagccggcggcgagggccgagactcggtcgctctgcagactcgaggccgtgagggcgacgatgatgacagacgaccggaagggcgaggctggcggggcctctctcgatggcgagggtgtccggacgacctcggacgtcggcgtcgccggaaagatgccgatgttgtgcgacttttcgagccgtcggatctcgcgcgtcgcttcgatgccgtccatgacgggcagctggatgtccatctgaagaaggagaggagcagtaggtcagtactcccggcgcaagaggcgccgtcggccgacggctcgacgcacgaggatcagatggaagcccccggttcgccacttgttgacggcctcaacgccgtccttggcgactccatacttgatcttgcgcttcttcatgaacgtcgacaggatggtctggttgatcgggttgtctgcgggcagcgcgagccatcagccaacaggtcacggcgaggacggagcagggcgactgaccctcgacaatgaggacgttgatcggcggcacgacgacgccgtcgtccttgggcggcttgcgcgccttcttctccttcttgacaacaggcgccggcgcaaccacagccggagccgcgccctccggctcgttgtcgggtaaaaccgctctcggcggcggcgacattggcagcgcagcagatgtcgtcgtcttcgggcttgtcgccgccggatgaggtggcggaccctcggtgttgggcgtccggggccgggtgttggaagacgtgttgctcgacggccgatgcgtcaagacgcctggtgcgaccgagcccgtctgcggcggcttgctgcgcgagacgcgcgtcgcaccgggcgacgtcgtctcggaccggtcgagcggcgagtgctgtggctcggaggctggcgaccggcgcgacattgtctcgcgccgcgagaggctcgtggcggcgccgagcgaggtcgactcggcgagtgaggccgcccgcgagtgtcgtgagccactactgctagagccagatccctttagcaggccgtcgatcgaggcattgtacgtcgcgaccgacggccgaacgacggtcgagctccgtcggcggtccgagccaaccgtctcgctccgagtcgacgaccggcgcgagccgacgttgcgcggggccgggtcgaaaaacatgcccatgggcatgccgtccgggctctggatgagcatgcccgaacgggcgttctgagcaaagacctcgttcggctcgcttccgcgggggatcgtcagatggaggccgttctcaagtccagccgtcatcagcggcgtccgggacgaggtcgacgtcgtgctgccagaagagacggtccggccttggacgggccggccggtgacgaggctgtcggacggcgagagctccttctgcgtcggcgagacggtcgacggggccgacgaggtcggtgctggaggaaagtagccatagcccgaaccaaactggcccgacgggctcagcggcgaggtggcgatcggtgtgaagaacgggtcgaccatcggccgatggacggccgtgtggagggccgtcaggaagcggcgcgggccgaccggctttgggatgacaatcacctcgggcagggcgccgagcgagcccgggctgaggatgctctggacgcagtcgcggacgttgctatagttggcgagcgacgtgaagtgaacgacaatgacgccccgcttggccggcgcaaccggctcgctcaacggcgtcaggagctgccggacatgcggcgacgaccgggcccggctgctgagtgtcggccgcttcgacttcatccgaagcggcattgccgtcaggctctggacccggagctgccgcaaccgacgcttgagcacctcgatgtcgtcgtctagaggccaagggggacgtgagtcagccgttgaccgtcaaagggggaggggcgcgtgacgtaccaatcatgatgaagctggcgccggtgtccttgtcgaggtcactgctgatgctcgacgcgagcgagtcgccgagcagcagcgactttgagctgtcgtttaccgccagcgggctcgtttcgtacggccgaacctgctgctgctgctgctgctgctgagagccctcgccgttaacgagcgtgctgtagatgttagggatgccgttcgagccgcccaagctgctgctgctgaagccgccgccgggcgagccctctccggccgaagcggccgcgcccattccggccagaccgaggtactcgttgccgtactcttcgtcgtcgcgctcggtcgagatgtggcgcatgtccatgccccaggccgtcaggtagctcgtgatgtgtcgcgcaaacgcactcgtctcgctcgcgtgaagcgcaaccttcttgccgcggagcgtctcagcaaagagcatgagctcggcgagcgtcggctcgcgcgcgagcttgagcgacgcaaacggctgccgggcggcctcctcctgggccgaaagcggcgccgggtcaaaaagcgacgagccacgctcgagcaagaccgagagctcgaaccgccggcggatcgaggaccgatcgccatcggtcaggagcgttgccgagacgtgccggatgagccgcgtcgtcagcggcgagtcgaggtgcggcagcggtgggagcagcgctcgattctcaatgtcgctcccgccgaccgagctcggcggcgccggcggatgcggcgcagcggcgagcgtctcgcctgcagactgcgtgaagcctgggaagctgtcggcgccggtcgcgttgggcgtgccggccttctcagtcatcggcgtccggttcggctggtcgtcccagcgcggggcgacgttgtggatgatctcaaacgtgcacgagagggcgttgccggcctcgaggcccgacgggctcgagaggtgtgagtgagtcgacgtcgacgagacggtccgctggcgcggaaagatcggcccaccgtcgggcaggccgtcctgcggccgctgcgggttgacgtggaggccaatctcgatcgcatcgcccggcttggagacgagcaggatctggcggatgacctgtgagaggggcaccggcgggggaatcagctcaggccaggccacaagagagagaaggcggtgcaggaccggcagacgtacatgtgagaggacgtagcagatgccgccctcgtcgccgcggacgctaaagtgcttcatcccgacgtcgccgtggtagaggacgaggtcgacgccggcctcggccattagcccgccgagcaggtcgccgacgctctgaaggatctcgccgacgtcaaactcctggaagaggctgaagccgtccgagggagcgagcgacatctgcgagtccatcgacgtcgatggcgtgtcggcctcgctcgccgccgttggatcccgaaggaccccgctcgggaacgagtcgcctggcgttatcgacgtcgcaaatgtcggcgaccggggcgggctcggttgcgacggcgagccctggcggaggttgctcctcgagcgcgacgtgctcgtcgcgagccggccgagctgggctttggggctcccatggagactctcgtctgcgcagagcggggcgatgtgctcgctcaagtagttgaggttcttcatcgccgtgaggaggctcgagaggctcgtcgccggcatctggaccgagcaggccgaaaactgctctttggccgagtcaaacaggtgcggcggcgtcacttggaggagtgtctggatcgccgcctggaccgagtcggcgagctcgagtgtgagcacatagaggcccgaggcggtagtcgcgtcgggcgtcggagggagcgagagcgcctcgtcgccaggcgtcgtcgagtcgctcgccgacatctggagcattggcagcagaccctcgaggtcaccgttggcgctactgctgatcgagctgcggtgctgcggcaggaggtacgagtcgctcgtggcagagaagtttgacgccggctggctgacgagcgtcggccggggcgcaaacgacggacgccggccgccgctgcctgaattcgacggccggcggctcgggtggatgaggttgcccaagcgcgcaggctggaccggggcagacacggcccggacgagcatcggcggcggcgagaggtgctgctggctccgatgccggttgccgttcggtccgtcctccgagtccgactctgacgacgaggcgtcgtaggcatacgcatcgggcgcgaggccgccgaccgagggcgacgagcggtcgccttgctggccaaggccgagggcagagacggttcctgaccgtttgcgcggtggctcgctgctgagcggcccaccggcctcctcatcgacgtcaagggctaccgtgccagacgacaaggatttggcggtcgcgaccggcaccgctgctgcgacagacgacgacgacagcagttgcggccgcggcgagtcgtcctcacccacgtcgtctggatcgctcccatcgtgcgcaaacgggtcgtgagcgaacgagacggctccgtcgtcgaatggatcgcgcggaacgagcgccgctatcggcggtggtgccggcggagatgatgtcgacggtgccgactgggagactgagccgaggccaagctcggacgagggatgctctgactggggagtccctcgggccgaggtcgaccaggtaaaggtcggctgggtcggcgacgacgaggccgacgagctcgaccggggctgcggcgacaggcggtagagaagtcagctccctgtcatgccgcgcaaagagaaacgagctcgggacggaaggagcgagcgatcgtttccagcgatctggtcgtccgcgcgaagctcgggccaggcgagcgagcagcgtcggagctcttcgagagaaaggacgtacaggcaacggtggttctatcgatatctggcgatggtcgtcgtctccgccgagcgtcgaggccgagggatacgcgcctggcgggctcagcgaaagcggctggccgtcgtcctcggacggaggggacgcggagatgggtcccatttggcgtgggcggggtaggaagaggggtgagagaggggtgctcgccggcggtcctcctccaaaaggccgggagacgtcggtcggttttcgttcgacgggtgtgctaggcaaacctgtgaagggaagcgtttaggaggatgggatgggagcctgcgacgacgagagggcagggacgaggtcggctgccgagggtgccggatgggagttgccgaggggctcgctcgctggttgccttcgaggtcggccggtgggcgagggctgtcgaacgggtagctatcctcggaggtgcacgccgtctggaccgagaggacgaccgggctgcaggcgaagacaagcaaagggaagaggtcgagaagggtgtgggcgtcgtgttggcgagctgctgctctggcgggcgaccactcagagcgtccactcgcgcgcgcgcgcgcggaaaacggcggacaggagtttccggtcaggcagagcggcgccccgggaagtacagtcgacgactctctcggtggggaccaggctgacgacgagggaacgaaagcgtcgtagagcaaggatcatcatatcggcaggccggcggtcaggtaggctcgtgcgtgtgctgccgagcgccagtcttggcggcagtgtcaggtcgcgtgcatgcagtgggcggcagcacaagtcgaagcatgtcctcggcggccatcctggtaggccgggccgcttgcgagctccagctttgagggcgacagggctggccagacctcgttccttctgcgaatcgggcgctcttccgccgtcggacgagggcgaactcctctggatcctacactagaccgaccccctgcgcgtctccttctctccttctcgctgcgtgcgcccgtctcgttcggtcccagagggcgcgggcgaccgataagtgtgtgcgagcgaccggcgaagacgaatccgtcgctcagctttgctctgatcgctcgcaaaggatgagctggcgcaccctatcagcgcaggacaaaagcacgcctggggcgaggacgcttgcacgtcacgaagctgcttggagtctggagcatcagtggccgaggtaacaggaaaaagagggtagaccgaagccttcctacgggcagggttgcgagggccgccgtacggcaggttgagagatcgaccggtctcgtggttgtgtcagcctgtaaacccatccctctacacctacactgcgcgctcgagccgagatgtcgcccggcaagcgtacgtctcactccagcccgactcgagccggtcaaggtggtccgacgagctctcctcccagccgatgccggccgtcggccagcgacgaggcgccgcgctgggctcgacaccggcgagagagtcagggccgggagttgagtcggtcgatgaatggtgggcgaaaccgcctctaccttggtaccttggctggtgagcaggcagaactggtaggatcggacgatgatggtcagtcgtcgagacggcgaactagtcgtcccttcttgctgacgggcgggcttgctatgttgttgctgcgatcgggcggacattggatctcgtcacgccctccacctgcgagaagagagacgcatgcctgctcgaccctccctcctcctcgagacctctcaaccaccacttgctctacacactttcagcaccatgtccgagcacaagggaaaggtatgccttcggtcttcctcgccctgtgcctccctcgtgtgccctgtgccgagcgtgatgaggtcgcgcactcactctcggaccgagggctgaccatcatcgctcggcggcgtcatcgcctcgtcttgccttgcccagaccatcacctgcaaaggtccgtcccaccgccgtccatgctagagacacctgaagctgactccgccctgtcgaccgtgcgtagccgccatcgcctgggaggccggcaagccgctctcgatcgaagaggtcgaggtcgccccgcccaagaagggcgaggtccgcattaagatcctgttgtacgtcggtctccctgcttgcccaaaaaagggtgcctcgagctgactaccgttctcgctctcgcttacgttgtgtagcaccggcctctgccacacgtgcgttttctccttcttcgcacaggcttcgtcacctttcgcatttagactgacgagctcgccctgggccgctagcgacgcctacaccctttctggccaggaccccgagggcgtcttcccctcaatcctcggacacgagggcggcggtgtcgtccgttccccgtctcctctcattggctgctcgtcgaggctgacctgagcttcggtcccgccgccgtcgtgtgtgcgcaggtcgagagtgtcggagaggacgtcgacaacgtcaagccggtcagtcgccgccttcctttcttcggtgcctgaaggcagccactaatgccacttgggtcaaatagggagaccatgtcatcccgctctacacggccgagtgcaaggagtgcaagttctgcacgtcgggcaagacgtgcggcccctcttccacgccatgacaccgccgagtaatccagctgactcttgctcgctcttcgctcatcaaagcaacctctgcggcgccgtccgggcgactcagggtaggggcgtcatgccggacggcacgacccgcttcaagtgcaagggcaaggacatccatcactttgttcgcctcccctctcgttggccccccctcatgacatcagctgacgtcccacaacctcgcctgctttccgcgcaccgcagatgggcacctcgaccttttcgcagttcaccgtcgtctccaagttctcggtcgtcgccatcaacgagaaggcgccgctcgacaaggcttgcctcctcggctgcggcatcaccaccggctacggcgccgcgaccaagacgcccgggatcgagcagtcgaccgtcgccgtctttggcgccggctgcgtcggcctctcggtcctccagggtgcaaaggcaaagaactgcagccggattatcgccgtcgacactaacccgggtaaggaggaggtcgcaaagaagtttggcgcgaccgagtttatcaacccgaaggacctgcccgagggcaagaagatccaggagcacctcgtcgagattaccgacggcgggcttgactttacgtttgatgccacgggcaacgtgcgctccttcattttttcgcccgcgctccctccggctcgctcgctgaccgctcttgtctgcgcaacactcgcaggtcgaggtcatgcgcgccgccctcgaggcctgccacaagggctggggcgtctcgaccgtcatcggtgtcgcgcccgccggcgccgagattgccacccggccgttccagctcgttcgtcctcgtctctttgcgactttcggcactgctgaggccagactgattggctatttaaactcgatctacaggtcaccggtcgcgtctggcgcggttcggcgttcggaggcgtcaagggccggactgagatcccagggattgtcgaggactacctcaacggcaagctgtccgtcctctagacccgtctctcccatcttacttcccccgctgacatttttctccgtctgtttggcagctgggtcgacgagttcatctcacacgagcgcaagtttgccgagatcaacgagggctttgacgacatgcacgccggcagctgcatccgctgcgtcgtcgacatggcctaaggttcgggcgagagagggttgatgtgacgacggggacgaagtgacgatgaatgacgacgacgttttcatacggcaggctgggggctatacaggggacgagggtaggggcagaggaagacgacggacccaatagagagcagagaaggatgaggccagaccgaaaggtaagaagaaaagagggcgagggaagctacaggagatgccgcttgtcggacggctgctggttgatggtcgactgcgagtagttgctgcaaagggaggaggagcaagcgacgtcagcggagggcagcgaccgtcacaaagtcaacggcgacgcacaggctgggagtcgccagcgaggcgccgtcgctgtccttgaggtcgtcgtccgacgtcgcaaacgccagctgaacactcaggctgtttttgccaggatcattgaagctctgctgccgttcgccgagcggatacccgcggaccgtcttgtggttcgggtcgtgggcggcgtagtcctcgacttcttcggtgacgacgtagcgggtcgtcgcgacttggacttcaaccgcccgacgctcgtgccggaggacgagcgagttgcgcgtaaggacaaagaggaggacctggaagccggacgtcgcgagcgtcagcgtggtcagggagattgagggcgcgtgcggcgagactcacgttggagacgccacttagagccatgaacgtcgacgcgaagaccatgacgctccagggaaaggcggccgcctgaaaggcgtcgtgcgtagtagtatataagcgcacgcagcaaattggggttactaaaatcgaataaagagctgatagacaggcggggttcgacgtcagcgcagtgtaagatttcgctgcgtgcgagacgtactcgggtaaaggaggagcttccgacagatcttctgcacctggcggccgatgtcctcgggtgcgcgcccaccagcggcagagcgaacgtccttgcccgcgacacccgagcggtgcatcgacgacgtcccgccgctgcggtccctcgagctcgtctggccaaagagccggccggcgaacgatgacgccggaaagtggccggcgagtttggcgtagatcgagaggtaagacacgaggctaagggcggccgcaaggagggcggtgcactgcgtgatgaggatgaaggcccgggcgtccttcgaaaagaaattgatgaagcaaaaggggctcgaggggccatagaagcggccgggtggcacgccagttgcgagcgaccggagcggaccggcggccatgatgatctgccagaaggagagcagtcatcagcaggccgagctgaacgctgagcgagacagtcgacgcacgaagatgtagagccagccgcaaccaatgccgatgtaaagcaagcggttgcgcagtcgggcgccaaggacgaggacagagaaggtcatgccggccatgaaggccgaaaagacggccgagccgagtgtcgagatctgctcgacgacggctacagtagggcaaggcaggctgtcaggtcaggcggcgggtcacggaggctgcgcgggtcgactgaccttgaaacgtgcaggcatggctctgagagcagctccatcagcatcgagtttttggtcagagggttgagggcgactcacggcaacctgtcggtccctcagaacccacctcagcgacatcgaccacccgagggcgccgaggaggtccgacagaaagagcgagagcaggcagaagcccacttgaagaacatggtcgtcagctgccgtcatcgagtcgcatagcgggggcaggctcggtctcactcggcgtgtggaaccagaaggcggtcgccgaggcatggcctgagctcttccgggagtagcgcagctgcagcgacaagtaggtcaggtcagcggcgacgtctcagcctgagaacagaggagacgctacgcacaaagatgtagaggaagaggccgacgatcgagatggccgagagcatgccggcgacggccggggcgaggagcgtcacggcctctgcgcggcgcaatcaagagtggtcagcgtcgctgtcccttgtcttgattgacaaaactcttcattttctcacggccaggggcgtatgtatacgcgtgagctgctctatccagcgtcggtcgcaagccaagaacctcctgccggccgtacgacgtgtgaacgacgacgtcaaacgtacccttctcctgcgggcgagcaaaggttggacgtcagcaggccgcgcagcctcgtcggccaagctcgagacagatgtacccagtcgacagtccaagggacgcccatagcagacaggttgtaagggccgacgaggccttgagcgaccctttccatctcgggcgagaggcgatcaaagggaggggcgagagcgaggcgagatcgaagggagaggaagagcggaggaacgtcggcgcttgagtcgggccgcataagagcgcggtcaggtaggcagctcgtgactcggcagagtagcagctggcgctcactcgtatttagaggaatggcaagaaggagaggcggtcgtcgaggaggtcgtcgaggaggaaggctgcggaagaagatggccgtcgagagggagagcgggcgcgcgccgttccggccggctcctcgttcgccgcgctcgcttggtcagagctttgccgagccggagctagtggcgtcgggccaagcgttttctttccgaatccgaaggtgaaagggaggggcggcggcggcggagcgacgctttgaaggcggcgcgctctcgtggacggcggcctctcttacgagcgtggcctgccatgtaagacgccgagccagcatgcctatcgccaactcgagaggaaagacaggcttggcacggaatgtcaaagtgaaagaagcaggtcggcgtctgttgccaggcgaggcccgagcgcctgctggcgaccacgagttgcgagaaacaaaggggaaggaccgagctgaaacggtggctgactcggagtgcgcggccgacagctttcgaccgaggacgacggcctggccactttgaggccttcaggaaaaggcggatgatgcatctcatcataaagagggggtatacaaggcacggtagtcctgggggccgactgccgggcgaaggggcgagatcgactgggcggccgagaggctgtcgctgctgaagggcagcgcggaaagagaacaacagagggggtctgcgccctcagaagaggtcttcgatcgtcatctgcttcatgagctgtgagaggcggaaaagggcagtaggcgcgttgtcagtagtgagcggatggagcgggcgctcgagttgtcgcgcgcgaaaggtgacgcacatcctattcgatcgagagacggaacgttcgagagcatcagcatgaggctcgcgcgaaagacgtgagggattttacgacgcgccgtgttctcgaccatggacgtaaactcctcgaagttgatcttgccgtcgctacgaaagagaccaagggagtgcagcgtcagtgggcgagcctgctgagccgcagagacgaggacgacgcacccgtccttgtccgcctccatgattgtcttgtctacgatctgctgcagctgtgcgtcctgcaaagcgcgcaaagggaagccgagtcagtgggacgacccgaagcgcgcacgcgggaggccggaccttgagattcgagccaaccatcatcttgagcacgaggaagagctcgccgttcgagatgaagccatcgcggtccatgtcgtacaccttgaaggcgactggagacggcgaggcgggtgcaggctcgtcagtgacgagtggcgggtggacgactgcgggcgagctaccgcgaccgaggcggacgagcagcccgtggcgagcgagccaaagcgggacgcacagcgcagcttctcttcccggccgcctttgctgctgaaagccgagaggccgccgacaaactcctggaagtcgaccgtgcctcctccgctgcgccgacgtgagaaagtcaaagcgacgtcatgcaaggtcagcagcggaacgctctcggccgtgtgctagctcgacctgctcgaagctcaagctcaagccgagacgggcacatcggagcggcacagacgcactcttcgtcaaagatggcaatcatccggctcgcgagcgggttgtttgcaatctgggggatcagcaggaactcgtccttgtcgatcgtgcccgagccgtcccggtcgagcttcatgaagcgcttcttgagccgctggagctcggccgccgagactaggggcgagcgggaggcgtgggtagtgatgcgtgcaatgggattgcgtgagtgcgaggccatagagggcgaggcggggggaagagggtggccggatggagagggaagcagggcggagcagcgaggtcagcgagcgacaggcggagacgagagcgtcagcggacagagtacgcaagacgagcgtttcggaagagcaagggaacgcacaattcgacgaccgctccatctctacagtgggaccgcgaagaagatcgaagctgtcagcccgtcgtgtcgcagaggaggcgaactcgaagctgggcagagatgctctccggccgcggcagtgtacgagactgaccgctgaacgcctggttgacagagcctgcctgacccatcgtgcagggagtttgaaggtgagtgtgggcgtgcgagctgtcgaagggtccgtcttgcgtaaggaggcgtgtctggagagctgcgtcggagggtcgtgtgggctggagggcaaaggtggtgggtggtagggagggcaagaagcggagcgacacgacgctggcttacttcgacccggcgacgacgatctcgaccaagagtctcgcgctcaccgctctttctctcttcaagacgtcggcacctcgagggcagcagcgagcggcatgctgctgagacgtggcatcctgggcggcttgcggctcaggcgggcgacgctgcctcccgtcctccgcaccgcggcttacccctcgatggtcgtcactcggacgagcgaggcacggcgccgcctggcttcctttctcgctagcagcagcaaacccagctcggtcgtcgagcggagcgaaatttcgcccgcgtcggtcgcccagacgacaatctttgcgctggcaaccccgcccggcaaggccggcgtcgccgtcttccgcgtctcaggcccagccatccaggacgtgctcgacacgatgatcttcccgctcggcagtcggccggacgagacggctgaagttcggtcggcgaagcctccgccggcgcgtaggatggtcatgcgcgatgttcgggtcccggctgtcgatggcgggagctcaccgggcgaggtcatcgacgaaggccttgtcgtctacttcgagggtccgtccgtccgctctgcccgcttgcagtactcttccctgctgaccttttctttcaaagcgggcaagtcgtttacgaacgagcccctgctcgagctccacctccactcgtcgcccgcgatcgcctcgcttgtcctctcctccctcggccgcctcccggccctccgccccgccgaccgcggcgagttcaccaagcgcgctttcctctctggccggctcgacctgaccgaggtcgaaggcctgcgcgacctgatcgagggcgagacggagctccagcgccggctcgcaaggcagggcatgaccggcgacgttagccggcgattcgagagcctgcgcgagcgcgtcgttaatgcgatggcgatggcggatgcgttgattgactttggagaggacgacgctatcggggatgaggcgttccgggccggtgcgtccttcctgcacgctctatcccatggctctctctctctaacaactcgctgagcccttctcccggcgccctgcttgagcagcccaggaccaggtcgggcacctcatccgcgagatccgcacccatcttgccgacgcaaagcgcggcgagctcctgcgtgagggcgtcaaagtctccatctttggcccgccgaacgccggcaaggtcagtcgagtcgagtcgttgctgaaggttcgctgtcggtcgaaaactgaccctccccgtcttctggcgccagtcctcgctcctcaacaagctctcgcaacgcgacgccgcaatcgtctctcctatcccaggcacgacccgcgacgtcgtcaccgtctcgctcgacctagacggcatcaaagccatcctctccgacacggccggcctccgcttgacgaccgacgcggtcgaggcgatcggcattgcgcgcgcagaggcatcgctcgcgggcgccgacctgaaagtgctcgtgttaccattgccgccctttgcgtacccctggacggacgtcgggacgctgctcgatgaggagctcgtgctgcgccacgtcgacggggagacgctcatcctcttcaatcagctcgaccttctgccgcctgccggcgctggcgccggcggcggcgggccggggaccgacctggagcgagcgggcaggctcgcagagcgcgtcgtgagtgactttatgcccgctggcacgcgctggtgggtagggagcgtggtgactggtgaggggatggaggccttcctcgccaaggggctgaacgccggcgtcagacgcaagtacgtccgccactcgcggttgcgaccatcctcgaccggccgcactcaagctgacgccgtgagccccctctgtaagagccctgctcgacgaagagggcaccgaagagctcccactcgtctcctccgcccgccaggcataccatctcgagcgtgccctctcgcaccttctcgacttctcccgtccgttccccgtctcccctctctcctccccctgtctcttatactcatctccgagcccacgagaccgatcagtatctcgggggcgacgcactgatctgggcgtcaaggtactcgccgacctcgagccgtcctccgacgagtggctcagcgagcgccagcgcaccccctctcgtccccagatacagactctcctgccagctgacgcggactggccgtccctctcctgtccgcggctccggcgccgacgactcgagcagccgctaagccgtgacggcgtgccgcatctggcttgcaagttcgagcgagtagctgcctgtgcagttggagccgaggccgacggcaatgccggcgtcgaggcacgcacggagggggagcgtctggcgcgaaaagtaggcgtcgctgagcgagaagtgggcgatcgacatgccgtgcctcttgacaagggcgatcgtctcgagcgtcaggaaggtgcagtgggcctgtcgagaaggtcatcagctggtctgcggagagttgcagaagagcggccgcgggccgcacctgtgccggcttatccgtcagcagcccgctctgaagtggcgaaaagcgtggccagtcagcgaaagctcttcccttccacgtcagacagagccagtcactcacccgacgaaagaccttctcaccctcgcagcccatcagcgaccgcacccggtcgacctggtcctgggcttctcacatgtgcgacgcaatgcgcgcgcccgagacatccgcgagcttgccgaggccggcgagcagcgcgtctgaacaagccggcacaaagcgggacgtgatgatctgaggcatgtgagagggtcggaagcggagaaggcggtcagtgtcacggctggggccctattgagcgagccctgcgcaccgggtggacaagattgcgctgcccttccaggagagagtacgcaggcgcgcgcacgtcgtcgatgaaggcctcgctcgtgcccttctcgacttagtcgggaaggccattctggtccattaagagcttgccgatgtaggtcttgaggccgagcgaggcgaagacgcgcgccaggatgaggctgcagtgagggagggacgtcagctgagcgttctcagacggactgctgacggaaggactgacttggactcgaccttgatcctcccgaagataagactgtctgggcccgacgtgcagaggatcagccttgcccggagaccacgagtgcggaccgacggacgaacgcagccgaggtaccgttctcgagaagtcgttcgccgaggcgtctgtacaccgcctcggcgagcgcagcgtcgccgtcgacccgcgtcttggccttgaaggcgtaccgtccgagccagttcatgagcgggaggtcgagcccggtgccggcataaaggtactgcgccgagtggaggtgcaggtcggtaaaggtcggcaggaggaagctgtgctctggcagatgcgtcacttcggccggccggaagtgggcctcgaagccgtacgacgccggggccgagactgggccgctgtagacgatctcgccctcggacgagacctctgggttgtcgacgacagaccgggatgacatggtcagcctcctttcgggtccgagcgcgtgcgcagcttgcaggccgacctaccgaggtactcgacgacgcccagtctcggcgtgtggagacaaagagatggctcgacatccaaggtcgaggtcgggatggctgtttggagaggtcaggcctgctgctgctgggacgggccggcggaggaggccgagcgcgagccggaacgatagagacgccttgctcctcttgacaccgacctcctcctcctccttcgtagaagcagtcagacgagacaaccctagccaaggcatatcagagctcgccggtgcgtcaatctcggtcttgctggtcatacgtgctcctgctgacctctgctgcctgccctcggagcagttgccgtccgtctcatccgacgcgaccacctcccctcgcgccgcaacatgccggcgagcgatccgctcctcctgagccgaatcgttactctgatcgcatccctggccgtctcgctcgtgtcgggcacgaactatgtcgtcggcgcatgggcgcccgaagtcaaggcccagctcggcctgagctcgacagcggtgagcatcgtccgtccccggcccgacgcgcgcgcttcgctgacctagaccgacccgccctgcctcctactgcagatcaatctcgtcggcgtctctggtaaccgtgagtgggaccgatgcacatccaggcagccgttctgtgtgctaacgcctgctgcccttcttcgctcagtcggcgtctacgtgagagcggcgcctttcctcgacgaccctcgcggtcccgcgcagcgcactgatccgccgcccttcatcgcagctcatcggaccgctcttcggcctccaggtcgaccgctctggcccgcgagccaacctgctatcgggctcgcttctgatcttctgcggctatctaggaatccgggcgttctatctcggccagattgcatacacggggtcgtggagcctgtgagtcgcccgaggcactcaaccgcagatgagctggctgctgactcgaacctcggcagcgcgctcctctgcaccttcaccttcttgacgggcgcagggtcgaccgctggcctcagcggagcgctcaacacggcagccaaggtgcgcgcacgctcgcggggctaggcgtaagtcccgccgctaacagctcgcccaatcccctgccagtcctttccggacaagacgcgagcgtccgcgaccggtctcgtccttgccggctttggactttcggccttcctgttctcgtccgtctcgcacgccctcttcccgacctcgaccgacgatttcctcctcctgctcgcctgcggctgcggcgtgacgatgctcgcaggcgccttcctcgtccggcccgtgccgcatgtgcacgtcgtcaactctcagggtgtggagagtgacggctacggcgcgggggagagcggttgggagcggatcgatgccgtcggcgagggaggctacgcggctgtgccggacacggacaatgaggacgacgccgacgagagcgggccggagatccaggtaacgccaccgacgccgctcgacgcgcccgcaagactaggtgtcttcgaagcgcccatcgcaccgcgacctccctcgccggcgtcgctcgccctcaagccgtcggtctcgcgctcgtcgggcaagaccctgctcggctcgccagtcaacatctcaggcctcggtctcgttcggagccttgacttttggatcctgacggccattgtctcgctgctgagcggaacgggtctcatgtgtccgtcccccttgcaaattctgcgagccgttcccgccgactctgaagctgactttgtgacttccctagggatcaacaactgcgggacggccacgctcgccctcttctcggccggcaaccccggctacgaccggctcgccgccgcaaagctccaggcaacgcaggtgtcggtcatctcggtctggaactgctcgggccggatcctgatcggtcggtcctttgccaggcatggtgcgtttcgctcttggctgctgacgtgtgtgcctctctcggatctcaggtgtcgcgaccgacctcgccaagacgcggttgcacgtcaggcggattcactttatggccctcgtcgccctcgtctttatcctctcgcagctggtcgccgcttcgacctcggacgtctcgcagctctggatcacgtcgtcgctgtgcgtcactgcgctcgccttgtttgctgcacccttctcgacactgacgaaggtgctcttactcgctcgatgcagcctcggactcggctatggtggcctttttggcctcgcgccgatcatcgccctggagctctttggcatggacaactggagcatgaagtgcatgcgccgaaagagcgctctgcaatcggacaggaaggaactgacgacgtgtttcgcttgacagctggggcatcgtcagcatgtcgcccgtcgtcggcagtaatacgctcaacctcctctttggccgcatctacgactcgcactcggtacgagtccccttcctacagcctctgacgctccttcgccaaagactgacttcagcgcccttgcccaattctgtgaaaacaggtcaagacggtcatcgaggcgacgcaggcgctgcttcggcgaggaggagtaaccgtcaacggcgagtgctatgagggcctggtccgtcctccgacctcggggtcgcgaatagaattcctcctactcaccttctctcctccttgactctgccagacctgctaccggccaatcttctacgcaacgacgacggcgtgcgtgctcgcgctcgctctgtcgctcgtcgctggctggcgacgcgagagggccggccgcgagcgagagaaggagcggcaggcgctcggcgtctgagtgctgcgcctgcacgtcgtcgggatccgggccggtcaagccgaaggttgaggaggggaaggagggtttgaaaaggaggagggatctcgagttgtactttgcaagcgcacttctacatgcggcactccataaagatcgcgtctcgtgcgaccgactttggccgctgccatcagcggtcaaagagcggcgtctgctgcttggccgggccgtgtcacgcgagacgtctctcggccggtaagcccgaggcgctcgcatcgacgctactgttgctctgtataacgcgtcgaacacctccgatgaagtacgcgtttcgacgaggcgcactcggacccactggcttggctccctgccccttgccactgacgtcgaagggggcgtcggcgtttggtggcctcgaagacgggcgccgggcgatcgagtcgacgttcgttccctccgatgcggccggcccgtcagcccacaccgccgacgacgacccactcccgcctcccagcaccctacctcgaccctcttcagtacttctgcccggagcgctctttctctcgacgcctcttgccgcatgtcggccaccagcacacccgcttcggcagcctcctcgacggccgccgccgctgcagcgtcatcgacgacgccgacgacgaccagcggcggcctctttggcacccggacggcctcgccctctgcctctgcctcgagcggcggcggcggtggcgggttcggtaacgggccgttcctcgggacagcctttggaggcagcaatccgccctccatctacctcatgtcagtctctcgcgtctcgtgtgggcgggcaggttggtcggtcacgcaggcgggtgggctgcgtgtcggcttcagtggccgaggccgactcagcgccagtcatccttttggaccatagcttgtctctgcatatcgcgtacgaaggggctgatgtgaggctatcgtcgctccccgccttgcagctgctttgttgtcatcatctgcctactgcttggcatcgtgagtcgcagctctcgcgttcagagcactactcgctgagtagctgccctccccgcacccgcggcggctgatccaaaagggcttccctctctgcccatcgccagtccctcttcgttgccacccgggccctgctcctccgccgacggctgcatcgcgcctgggcagcgaccggctactcggacacgttcttcgagaataacccaacgattgctgccttgcatggcgtccagggctggggcgccggcggctggggcgcgacccaggtccgcaagcgcgagaagaagctcggcaagcggccgacgatgtgggaggtcgagctgcccgaggacgaggcggcggcggcggccctggctgagaaggaggcaatgatgctcgactcgccgtcttcggtcgcgggcagcagcagcaccggcggtagcggcgagtgggagaagctccaggtgcgttcaggccgggacatcttgctcacgtcaacctccttctgacccttctcgccttatcaactgcagccgatatcggtccgcattctgtcgaacggcgatccgacactgccctcggagcccgtcgcacccgccgcccggcccgcccctccctcgccgacgttcatgcagacgctgcgcgggccgccgatccggccgcccgcccagcccgccttcttcgcgacggccgagccggtcgtgctcgggcctgagcagtcggtcgacgcgcttgagcgcgagcgggcacccatggaggtcagtgtcctcgtccggctgccggtcgcccccgcggagcttgaggagcgtgaggcacggaggcgagagcgttcggcgacgctcgtcgctggccaggagctcatcgacgacgacgagggcgagaacctgcccgagctctggattgcgaccgagcggatcgagcttctctagaggcgtggctcgcaggactttgtctctctcccctgaccttacctccactctgtactatctctcacccatctgtgttgcttctcccatgttggaatcttcgaatctaatgtcgaccatgttctggctgcgtcagaagcgagagggtcatacaagaggccgttttttgagagaagaagaggtactgctgtgttggcaggagggaaattgcgccgagccgtatcggcgcaagactaaagggaaggagacgagtcatctaagtggaggggaaagcggacgttgcagatccggccggtcggacaatgggctgtggtcaaaaatgcacaggaagcgggccatgcttagagcacaaaggcgccgagcgaggcaaaaacgacggcgaggaggccagcgaagacgccgcgaggggcgagcgcgcccgctgcattctcgggctcgcccgggccagcctggcctgtctcgttctgcgagccgttggcgacccagtcgcgtcgcgcagcctccatgatgaggacgaagctctgcgcctcggggctctttgagccgggcgccgaccagtcgtaggggttgacgacgggcgcgacccagccgtcggagccggcggccgagttgaggtaggtcgagacgttgttgtacgtccgctcggcgtaagggacgtaggccgacgtcaggtccatagccgacaggcggtaggccgcgccggcgagcatgattggtccggcagcgtccgggaagctcgactggttgaggatgtagttgtgcatgagaccgttggcgaacttgggagcagagacgagcgcgtcagcttcgggcacggctgcagagaaatgacgcgaacgcagcgcacctgatgaacgtcagcatcggagaggatctcttcgatgtagcgctgcaggtcctgctgctggctctggaaggccaggttgaggccggagttgcgcatagctgaagcggacgcagagggaaaggtcagtctgagcaggccgtgacagggcgcgagatcaacgcacaggcaaggacgcggaccatgccggcggcggcccagccgttaccggtcgcccattcgccctcgtcgattgagccctcaccgaggaggatgtctgcgggcagtggcgaagataggggaaggatgacgtcagctgtgcgatccggagcgagctgcggcaggaggtcgacacgggggcagagggagaaggactgacgcttccagacgcccgacttgctcttcatgacctgtggcagtgggcgagtcgaatggaagatcagcggattggcgatgtcaagaaggagccgccgcgcgcagtcgacaaggacgaacctcgcggtagcgctggcactggaggaaggcctcggtcatgagcgtctggttgttggtgatggcagcatagtacgccaggaagggcgggaccatgtaggtcgagtcggaccacagctgggcctggtcgcgccggtgcgagatcgcgccgttggacgagcgcgggacgtagcgcaggaggtaggtgatctgcgtggcgaagagcgtgagtcagcaacgacgagcatgcatgcatgtgcggagagagcagtcgagggaagcacttcgtcctcggcagccgtgccatattcaaagtcggaccagccgctgtagttggcccagacgacaacctcgcctagcaaacgtggcgcacagcgcgaaggaaggcacgtatcagcccgaccgtcctcgagaaggcgaagagggcaggctgcgacaggcagaaggtcacgtgccgcggcacgcagacgcgtagagtagatctacccctccgctgaggtgtctgatggatcgcctgctcgatggccttcccttcggccgcacctcaaatccccaatgcttggcggcctttggtggagggcgaggaaggcgaagactgcggccaacagcctgcttccgcctccgggtcatcgcgcacccagctgaggtatgcatgcaaggtcaaggcgacgcacctagggaggctgggtcgcccgcggcgccgtcgtcgaggagtgagaggtggttgtaggtgccctggcgggcggcggtcgagttgagcgagctcgggccaaacgcctcgaccttgctgacgagcgtcgcccttgcgaggccgccgagcgtcgtgtcctcggcgagcgtgtttgacgagagggcgccgacgaagccagcacgaaagggcgtgagttctgggtgtttgaactcggtcagggcccgggcgagcgtgccgttctcccacgaaagggtcgaggtcgaggccgtctcgacgaggcgcgccaagatggcgtccgagagcggcgtcagggcggccgcgagcgagggcagggcgagcgcgaggacgagcggcgcgaccatggctgagaacaagaagtgcaggagggagcactcggccgtaagggtgtatgctggcggtcggggatggaaagggaaggcgctgctggacgacgacggcccggcaggctcggcgtgcgttgcggctccgatcgatcgctgctctcgctcgtcacctttggcttgagctggaaggatacttgcctctcgccacaaatatggtccctggtcgacgaggcttctgtccgtgagtcgaccgcccgctgtgaaactgcaaggtagtgcagagtcttgcccggtccacctcggcttccatggctgtcgcttggtgctgcgcacgactgactcccagccgccagcgagcccacccaaggacgagtgcgtatcaatgtcatcgtatgagggcgatccttcggccggccgcaagaacgcgcgccagagccaggaggagtccggcctcttttctcgctcgtcgagatcccgtctacttggcctcgacggcctgctgctgctgctcgccctccttgcggccgccccggttgccgccgccctgggcaccaccccggttgcctcccttagcgccgccgctctggcctccgctctggccgccgccgttgccggcgctcgactgcatggcccagttcatcgtctgggcactctctgcaatgtcgcgcgtgatggcgaggatcgactggctcggcgggttgaacggccgcgtgatgtggagcatgttggcgttgaggtcaatcttaccctcgagccgggtgtcgcgtatcaggttgacgatccacttctcgccctcctcccgggtcaggttcagccgagccgacaggtcgctgggagaacagggtgagaggaggtaatcagcgacaatccggcaggggacagcctagtgacctggcgacgcacttgatgtcgacgcgctcgtggatcttgcagtacgtctcgctgacgaggtaccgagcgttctcgaggaacgactccatcttctttccgtcctcgtcggcgtcggcgaggaaaaagtcgtttttgatgacctgctcggccgcgagcgtcaggctctcctgcgcgccctcaaagtcaaactcgagctggagctgggtgatgaactcggtgagcgggtccgagtactggtaggcctcgccctcgatcgcccggacgacctccttgagggggtcggtccgcttctgtccggtcacgcgcggcggcggcggcagccggtgggtgacgatgacggcaaaaacaaggtagcgcagcaggtgcgggcacgacgtccggatcgtcgcgaggtagggcggggagaggaagagctcgagcagggccggcaggccgtccgggtggttgaagtagacaaacagcgaccagtgaaggagccagctccgggcctggagctgagcaaggtcgccgccctggccggcagcaccggcgctggcgccgtccggaagccggagcgcgaaagccgtgcccgagcgcgagtcaatcaggtcgcggagctcctcaatctgcttgagcgccgcctcccacgagcccgacaagatgtcggccgcgagcttgccccaatgagccgagaggttgaggtccgggtcggtcgacaggacgaggaagtggtagaggtactgcgaggcaccctcgtagtcgccgtaggtgaactgatactggccgaagtggtagagcgacaggatcgagtcctgcgtgagctgtagagcgacggggcccaggaagcaaggcacgcggtgtcagcaggggtagcccgtcagagagagctgcgcagagcttggagcttgcagacgcacgccgtagtgctccttgagccagatcatgttctggtccttgtcctgcttgagctggccggcgacctccgggttggcaatgacgttgaggacctgctcagccgcgtccgccagctgcgagttctttgcgtggatctcggcctggcgggcctcgaagtctggaagaggtcgtaagagtgagcgggtcagccgggcccgatctgccgacgcccgaggaggtcgtcctagcctcgtaggctcccagctgccgcaactcctcctcggcaacctcgtcgtaacgcgcaggacgcaccgaaagggctcggcttgcccgggtggacctgctcaaacagctggcccatgtactcgaccatgttggtcttcttgacgagctcgtactgggcggccgtgatcgaggcctcggggaaaagcgagctgcgagggaggacgggcggagcctaagtcagctcgcttgcacagagatgtgaacagagcaagagcacaggactgacggctcgaggttgttgaggtggccgacataaggaatggccaggtgccggtccaagaacgggacgacacgctgtgacaggcgcaacgcgagggagacaggtctgtcagcgacgtggcgtcggcgggcgagcagcgttcatcttgacgcacctgcgtgaggtcgtactctgccatcttgaaacggagactgaggggagaggtgggaggaggaaggcgggagggaatgagggtggcagggaggaggaggagcttcgacagcaaggggttcgggtcgggcctcgtgcgggcgcggcgagctggccttgtcccgcccgcaggagcgaccctccgctcgcaagcgcgaaacgaaatgtgtcggagggcagccagccctcgtcgaaatcatctattgagtccgtctaagtctccctcggcacctcggcccgctggcaacaaatcaggtcatgagattcttgtgtctaggctaccaagaggaggagaaggagagagagaaagagagagggttcgcgcttggccgggccgtccttacttgctgagcttgggcgcatgttggggatacagccgaggcgggcccgacgctttcggtggcggcggcggcgattgatggctgccgttggcatggccggtggttgttgcccggccgccagctccgtagctcgtcccgaatgggatgacgaggtcgccgccgaggacgccgccgctctccttttcttgccggaagagcgaggcgtcggtcgtactcgagggcaggaacgagccctcgcggatcgcctcgatcttgcggaccttcttctcctgggccgcgacctcgcccttggccgactggtacatgtagaggccgacgaaggtcaggccgatgccgctgtgtggaggagaaaaagcgtcagtcatgcgtcgggcagagaggaccgcgttgacggcgacgcacaggccctggatgacgtgaaccttctggtggaaccagacgatggccatgacgatgacaaagatgcgcttgacgagcgaggctatcgaataggtgacgggcgaggtcgacgagagaatgttgaaggcgaggacattctggagaaagtgcgaggtcccgttgaggaaaaagtagtagaggaggtgggccgtccgcggcggcgggtgggggacctggctcgcccggatccgcacgtccttgacgatcggcccgaggtccgagtagagccagagcgggaccatgaagagaaacgcgagcgaggacgaataaaagaggaggttgatcttgtcgagccgctggttagtcgccgcgctcccgtctttgtgaccggcgctcgcgcccgtcgtcgacgggacaatcttcttgaaaaagatgttggacgagacgaagacaagggtcgagccaaaggcgcagatgaggccaaagtagtttgacgccgagacgtcgaacgagcaggcaaacatgacgccgagcgtgagcggaacgagcgcgacgtaggtcgaggccgagtacgagacgccaaaaaggaagcggtacgacagtacggtaaagagcggcgagagggcctgcgacgttgagaggcgcgtcagtcgatgcttgcagccccgctcgccgaggcgcaagactgaccttgatcgtgtggacggtcgcaaccgggacccgacttgtggcgacgctcgagaagacgtggccaccgacctggaagccggccatcggcaggacgccgcggaggagcgctttcgtcggctcgtgcagcgtcccgagccggagcgccggtcgcgtgtagatgtagcagtagagggcgatgacggcgaactggatgagcgtgagcgtcaccggaaacttgaaggcgttgaagatggatttgcccgtgttggacgagagggccgacgagaaataccagaggcagcagagcgagacaactggcaggagagggcgcaagggtcagcgctgagcgcagtgcgcaacacgaggcggggccaggccctccaacgtacacttgacgttgccgacaagccccgtcgacgaggccgacatcaggtcattcttgatgccgctagcgagtgcgacgagcgagccgagcgggcccgccgctgacgacccggcctggggcgaggccggccggcgatgcggcgcgaagctgttgaacggcaggttggcggccggcatggtcggcaccgacggccgcctcgtcccacgcttttcgagtcctccgttggcgagaccgctgcctgacgcacccgtcgtcttgccagcgctgtctccgccgaggaaggcatcgcccaagccgccgtcctgccagccggagccggtcgcgccgctgccgctggtgtgctgctgaaagtggccctcctcgtaatcttgtgacgagcttgcggcaaacgctctccgtggcggcccgccgttggcgagctgggcgggcatcgactgtgccgaaaactatgctggcctggaggagaatgcgacggtcgaggacgcaaggcgggtcggcgggaggcaagtcgtgaaggaggcggcagcagcgatggatggccacgagctcctagtgaccttcccgtgcgattggcggcagggcaagcgataggtaacgagcactgaagtcgtccgaagaggtaacggctcggagatagggtgttcaggtcgagtagcggtgttgaggagtaggcgtcaagagcggtcgaggcgatttctcgcagagcgcgccgtctcgcgtccacctcggcggcaggcgcagcaggaccaacaggatgaacgttgtactctgctgccgcattccagtcttctgacgaatcaggtgagatgacggtgatcaatgcaggttgcgaaatgtgggacatgttctatggaaggtgtgtgtgagactgggagaaagcgacgtcctggacggcgcatcgttgtgagtgatgcggccctgatgatacaggccgagagcaggcgaataggggagcacgggacggtgaaagcacgagaggctggctaggtctgcgatcaggtcggccgctcaggaaggttgaagctgatggacggtccaagcatgttggcctcggcgtcggcggccatcgaagctgtcgtaaacgtctgcgagacgtcctcgccctcgtccgacagcgggttgaggaggaggccgctcgtcgacggactcggctcggacgggcgtgagaccatcgggctcatcggctcgaggcgcgggaccgacgccgctggtgagggcgggcccgaggccgcgggcgagtccatgaagcggatcgtcgacggccgggtcgacgacgagctcgagaaggtccgcgacttgccagtcgaggggacgctgagcagcgactcgggctcgccgccaggcggcgatccaggcggggtcagcgtccggtcggcactccggcttgaggacgagttggggagaagctttttgcggaggccgctcgtcgccgacttgcgcgacgacggccggtttgaatggatgaagattgccggcggcttcggcgtcttgccaccggcctgtgacgagctgccggatgcgcgatgcgacggcggaggcgattgtgactcggcgctccgctgccagctgccatcgttgtcattgtcgtcgtcgtcgtccgcccagtccgtttctttgacgccgtcggccgcggcacggcgctgaccacgctcgtgcttctcggacgcccggcgctcgagccgcttgcgctcgtgggcgggcgactcgcggacgaggtgcataaagccgtcgacaaagctctcctcgagctcctcaacgtcatccttgaggccagcgatgaagccgttgacctccttcttgacctcgtcgcgcgggcccttgaacgggtaggccttctccgtcttgtccttggcaaagcggttgcgaatgacctcgacgtggacctggagagtatgaaggagtcagcgcaaggtgaagactcagattgggaaaagggagacgcacgtcgccgtcctcagccaaacgacgctcaatgacgagatgattgccctcgcggaactcgcgcacgggcggcgtccggcggccgtcgctctcgagctggtgctcttcggcggtctccatcgcctcctgctcctcgccctcgatctcctcgcgggcctcttcgtggacggcctcgcgcgagaggttgtggtccttggctgcgatgtccttcatgcgctcctcgacagccttgtgctcctgttcggggctcattgggctctcgtcaccggtccgacccttgatagcggtcgagctgccagacgacgaagaggcagagccctcagcggcttcgcgctcgcgctcgcgctcgctccgccgcatctcctccttctcctcggccgtcaggtcgtcgtctagctcgcggcgctcggcctgcgagcccttctcgaggtcgtcgtcgtcgcggttgatgcggataatctggccggggatgatcctgttgacgcccgagagccaggctggctcgggccggcgcgtgtcgcgcgacaagcccgacatacgcgtctcggtccgggtgagcatgatcgagtgcgtgcgcgagatcgagtggacgcggcggccgagcgagaagaaggggatcgacaagccgtggacgagaaccgagcagaggaccatgaagtggacgatcggctgaatcgtgccagcgagcaggtcgacctgggtcggcggcgggtagatcggctcgggcagcttggtcgcggcgagagtcgaaatgaagatggcacctaagaagagcgaaccatgggtcagcacggtacggccggtcagtgaagacggctggggcactgaccgacgccgatcgggccgaagtggccgacgaagcaggcttcgcggaaggtgtggatgtcgggaatccacttgtacagggcgagcatgaccggcagccggcggaggacaaagatggcgatggtgaggacgacgagccgccagacgctaagcgtcaggtcggcattgtcgagctggtcgaacgggatgatggcaccaatgtagatgaaggccgtgacgttgaacaggaggtcgatgacgtttgagaagtacgactcctccgtctgtttattaaagaacccgtcccaggcaaaggccgtgccgcaggcaaaggcggcgagcaggtcgtctgagccgagcagcgtcgtgatgcctggcggagcgcgagcagcaggtcagcttctagccaacacctatgacagtgatcgggacacgtaccaatcgtgaggacggccaagctgatgtactgcgcgacaaacgactgccggtcgatgaggttcttgcgctcgacaaacttcatgagcttgcgggcgataaagccgacgagggcgccaatgacgatgccgagcgcaacctcgtaaagccaggtgacgtagaaccactcgccgacagcgtgcgcgtccgaggcgtcgagcgtcagatagagggcgatgtacaggaaggggaaggcggcgccgtcgttgcagcccgactcgaccgcgagcagatgccgcaggtgggccgggacgtgcttgtcggcgtacttgcctccaatgacggcctgggcgagaatctgtagggcggtggaatgtgtcagagggtcagcgggatgctcctggagcatgcttatgctcgagtggacggaccgggtcggtcggtgtgacgcaggcggcaatgacgagggccgacaggaacgagagtcccgggatgatgccgtagatgagcgcggccgatacgaaccagccaaagaccatcaccgggccgagcaggaacgcgaccgacttccagtgcttgcgcaggtaggccttgggcaactctgcgagagagcgccggaggggagcaggttcagcttcagtctattctgcgctgaaggcgcgtagacgcaccgacgccgacggcaaagacggagatggcgatgacgactcgagtgacctcctggcaggcgaggatgacggggcgagggggcgaacaaggcggtccagaacacaggttggccgtcagccaccgccatgccaaggacaagcattcagagagcctaggcgaccaccaacgcaccagggtgatctcgttgctgacttcgtgctcagcgccgccccacttgcgtgggtcgaagccgccagtgacgtacggtccggcgatgatgccaaccactggaaaggacagggagggcagggtcagcattggcagctcgtcatcaggagctggggcgcgagctaggaccaacaggtggcgatgacggcctctccgatgaacaacttctccttgacgaagagcgagaacatgccgaactgagggaggcgtaagagaagccagggcgccaatggagaaagaggggcagggcacagggcggggaccagaggttcgtgtcagaaggcggagggcgtcggaagacagggctgagctctggagagtcgacgcacaaggacgatgaacgctctggagcagacaagcgaaagtgagctcgtcagcctgctgagcagcgtgagtagacgcagctgtcgagcgattcagactcacccaaggatcgtgtacgccaggtggacggctgcgagaggggcaggctcaaacgtcagcagcgttcagaagctcgccgccgttacagcgccaagacgagcaagctgctcgtaccattgacctcgaacggatggaagcctcctccgccgcctgccatcggatgtgagagacgctgctagcgagggtcaagtgggagggttgaagaacggttgcgaactcgtcggccgaggtcgggcaagagtgcggcgttcgaaggcttgcttccttattgtttgtcgcgggcgggtcgcggttctttccttccttcaagcggtcgtgcgagcgagagctgcgagctcgggaaagtagttaagaggatagagtcgttggcgggtgacggttcaggaggaagagggtgcagggctgcaagctggctgctggagccggcccccgcggggatcgacgacgggccaagagaagcggcgccgaattcggctcaccctcccgcgcagtcgagcaggcggcaacccttcgtcatatcccatggtacaagccgggagcgcgaggccgaatctaggtctgctgctcgagctcggccttgtaatcgcggatggccatctcgaagccggtcgtcgcgtcgtcccgccggaagcccatagcgaccggcccgtcattgacgaagctccctggccagctctcgacgatggcgacgacgcgttcgtcccgctcgtacgagatgagctcaagcggttccggcccggcgacggctttgagggcggcgagcagcttgcgcgacgttgtcgtgcaagacggtaggttgacagtccgcgagtgcgccggaaacgcgctctcagggatcgtcaacgaatagagaaggttgtagacgacctggcaatggggcgagagagtcagcgagggatgggctagtcatgcgcccgcaagctactcacagtgctcgtcgacgtgaagtagaatggcatgtcgagcgaaggctcgtctgggccgttggcgatcgggcatactgcagggacgcccatcagcggctcacgcacgagaccgctaatgaacgacgacgctgcgctcgacggagcctgtcggtcgaggagtggtcagcctcgcgattctggtgtcgctgggcgagctgccgtagacgcacccccggtcggacggcgacagtcggcagacggaggatgcggccgtcaatgaagcctttgcgggtcgcgtcgaagacatagagctcgacgaccgccttctgggcgccgtacgagctttgaggctgaaggggtgtcgacctggtggggacgaaagatcgtcaggacgtcaagctcgccagcgacgtgcaggaagacttacccggggtcgaccattgactctggcctgcactgcggtcctccgctgagagagcgggtgatgggacaagagcgtcagctcggctcgctctgttcagccgccgaggtgctgtgggctcactaaacggcgagcgacgacgtgtacacgtagagcggaagcggcgagccagcgggagccgacttgtgcgcctctcgaacgactttgagaagagcaatgtgcgagtcgacgttaactggggacggcacacgaacggcagcaagtcagtctcgatgaagaggctcgaggcagcaggcccgcgagcagcctcggaaacgcacctcggtagccgagttcgaagtcggcctcgctcccacctgacatgaggccgtgaagcgcatagacagccagcccagactcgaccgcgatgccaccaaaaagccgagcaaggtcagtcgcgtcggcaaggtcggcaccgacggcagtgatccggccagagtccttgagcgcggcggggatcggcggcgggctgatgtcggtcaggacgatggagacggtcgatgaggcggctgcgatggccgtgagaaggcgctggccgaggaagccgctatggatgaagacagtggagaagacgatgttgagccatcgcacagaaagactaggcagctgcgcgaacgacagactgacccggcgccggtgatgagaatcgtcttgagagagcggcacgcgaagagcagcatcagcacgacagctgcgtgtcacatggtgacatggcaaaagagcgcaccttgatgtggtcgggcagagatacggctgggatggaggacctggcgaggcggcgataggcatcagctgggtcagctgcggtcacagactcgggcgcgaagattgcccgcagacgtacgacatgctggcaagtcttgcgtttgagacgatgatggtggaggagcggcaccttggccaagatcaacacgcctgctgctgctgctacgaagccggtcggtcggatgttcgggccatcgcgccgaggatgaaccgagacggctcgagccgacgcgcggtacaggaagggaggaccgccgtcgccacggccacgatctggaactcgctagcagcctcgtggtcgagcaggaggttcagggaccgacgcgatctccttttgaagcttgtctagctgttgttgctgctgggctgaggtcgctgtcaggcgcgtggcggcgtcgcctccgaacttcacgctgcgctctgccttcacgatctgctctcgacgttgaccatgtccgaacgagagacctcccgcagacccagaccggctcgtcttctctcgcctgtgctgctgctaaacgtaggcaagatggcactcgcaggcgtggcctttgctcgggacgactgatgtgccgacgcgagctcgcgccctacctctttagctgcagcagctgctgccgccggctgatcgcgccggtcgtgccgtccaaagccgctcgtagatcgcccgcggccgccgtttggggtcagggcaaggcaggggtggagggagaagtcgctgcttggcacgacgccccctcctttggtaccgagtgttcagcccccaaaccgctccgccaacctcatctcttctttaccgcacctcgttcgcttcgcccagcgcgacgtctaaaagcccggcgcgatggaccggtcggccgcggcgcaccctttcgtgccggggaccgcgccccaaccttgcccagcttccgctctcggctcatctgggcccgtttccggtagctgacccgagctgacccccctcccttccctgcctgcctgccctgcctgctgatgacccaccgtggcacagatgccggtgcctgctgctgcttaaaggaccgtcagccccaccaagtcaaccctcttcgcccctccttccccgtcccgtctgccaagcccctctcctcctggctgtccactccgcaagccgacctatccgacacctcactcgcgacgccacttcctcgtcctctccttcggtttgcaatctcagcggctacaagagccatcctccagcagcatgtcggcctccccgcgcgactcgttcgacggcgacctcaaggagaagcactcgcgcaatgtcgagcacatcgacgacgtcagccgcccggatgacaccaagttcaccaagaaggccgtcatctcggacgacgtctaccactttggcaagatgccagaggaggagctcgaggacaggcgcaaaaagctcgtccgcatcgtcgacctccggtgagcatctgccttgcgagcctccctgattcggactacatagaacgagactgacctcgttgcccctctttccttcctatagcctcatggtaagcatgacgacggctggtccttatgttgactgatcaagactgacacttgcctttcgtgctgcagcccctgatggtcagcatctcgcttgttgctgcgcgccgccctccgccggccgagactgacacttcagcttttccccgtgtctctgcacacagactctcatgtactttctcaacttgtgagtgtcacctaggctctcagtgaagctgcatccggactgatgttgtttcccgccccccagcgtcgaccggtccaacctggccaacgcccggctcggctccctcgaagcggatcttggaatgtcaggcaacgatttcaacacggccaccagcgtgctttttgtgggctatatcatctttcagcttccctcgaatatggctttggttcgtcgttcgtttcgatgatcaatggtcgaccggagctgacggaccttcgccccttgccccttccctttgccctcacagactaaagtcaagccgtctctggcgctgccgtcagcgatgatgctctggggactcgtctcccttctgacggcctgggtccagaactacgggggcttgattgccgtccgcttcatcctcggtattgtcgagggtgcgtcctcgcgcgcagccagctcatccgccagcactcgtactgaccttcttctctttcaactctagcccccttcttccctggtgccatgttcgtcctctcgtcgtggtacacgcgggccgagctcggtaagcgctacgccttcttctacgccggtgctgccctcgccaactcgttcaacggtctcctgtctgccatcgtcctccggagcctcgacggtcgcatgggctatgcaggctggcgctggctctatattatcgaggtgcgtgccgtagtactcgcctcgaccactcgtcgcagatgctgacgtacagtcattctcttcgcagggcgcccttacgatgtttgtcgccctcttcgggtactggctcctgcccaactacccgatcgacacccagtggctgagcgaggagcagcggcattatgccgcctggcggctcgccgtcgatatgggctcggacgactcggacgaggacctcggcctgttggcgtcggtcaagatggcggtcaaggaccccaagctctacctcttcatgctcatccagcacctcatcctactctcgcagtcgttccagtatgtcttcccgtcggtcgtcaagacgctcggttacagcacgaccatcacttccctcctcacggccccgccgtggtttgcagcctttctcgccggccttgcgacgacctggtcggcctcgcgcacccagcagcgcggctactacattgtcggcacaatgttcctctcggccgtcggcaacatgatggtcacttttggcacttcgctcggcgtccgctacactggcatgatcttcctttgcatgggcgtcctctcggccttccagattgccctcacctgggtctccaactcgttcgcccggccgaccggcaagcgcgccgcttgcatcgccatggtcaacctctttggcaactcggccaacacctacggcgcgcagctgtacccgtcccgcgacggcccccagtaccgcctcgtgagtcgccctgccattgtccgtctcgaggtgactctttctgacactcctgcttccgtctcctcttcagggctgcctcgtcatgttcggcgtcagtcttatcgtcgtatgtcttgccctcgtcatccgattcatcctttacaagcagaaccgccagatggaccgcgcgcagggcattgccgtcgccggcgacaaggacggcgagcacggcaacacgacagacccgtccgagcgcggtttccgcttcctgctctagaccggcgacctcttcagatgtaaaccacctcctcttcaatctccatgttctgcgctgtatcatgagtcatcggcccttcaccgtctctcgcccgaggacattgagcggatggtgcgcgaggccgaggagtttgccgacgaggacgcggccgtcaagaagcgggtcgaggcgctcaacgcgctccagaactcggtctacggcctcaagtcgcagctcgccgacgccgagggtctcggtggcaagctcgaggaggccgacaagaagacgcttcttgccgagatcaaggacatccaggagtgggccgacgccaactcggccgaggcgacggccgaggattttgaggagaagctcgcccagttccagtcggtcgtctcgcccatcacctcaaagctctaccagggtggaggtgcttcgggtgaccaggagtcgtggggctcccacgatgagctctgagaaaattagagctcgtcggcaggaggagtggcctctgaacttctcttgcctatccaaaatgacttcagcatgctctcgacgcgcggacgggccggtttaccccatgacgggggtgtgggccacaggagactgaattcagcggcttaggagcgagtcagcgttgccgtcggacgagcatgctgtcttaagagcggcttcgtgttggtcaggtcagcaccgagaacaagagcagaagggccagagcgtgtgaacctccctctgtacacactatgactcatactatgagattcgctcagagctctgctatgggttctgctatgaattgttctacgagtttgcttcgagttgcgcgcaggtactacagccgcatcctcaagcacctttgcgagagcctctgcttgccgttcagttgccgactgcagccaggccaaatcgttccggacatctccaaacacgccgaccatgtcaagaaggtcctcaagcaggctcggaccgatgccccccctgctcgtcaacaccgaggaccgccttccttcggggtcgcttggcgagcgacgcctttgactatggcaagctgcatctgaagcgatcttctgaagccagccggtcgcctacttgaggctgagaagctccttggccgcctgcgcgacgaccttagagtcggctgccgtgcgaccgacctccttgtagaagccgttcatcaggccgccgagcgccttcatgctgcccttctctgatccaagcgattcggccagccgagcgaggatcggcgagatctagcaagcaagaaggatgccaacgtcagaattcaggcgagtctcgcgtcttgaacgtgagcgtgcgagtactcacctgctcgagcggcatgaatgtcggcaggaaggacgaaatgaactcgacctccttgagctccttctcggcgaggtcattgcggtcggccgccttgtactgcgctgcgctctcttgctgttgggaggaccagcaaaggtcagctctcatcctgttcgaagtcgtgggctcagcaacgccggacgtacccgccggctgatcgacttctggatgaccttgacgatctgctcggccgaagcctcgatgggcggcgacggcgccttctcgaagtaggtgatatcggccatcaggctctgcagatgagaccggacagatcgaagacgcaaggcaaggtcaaggtgtcagctcgagggcaagccgaggcgagctgcgtccggcccaggtcggcgcaccttgaccatgctagtctgagccgtgtcgcgcgccttcatcgccgtcttgagtgccgtcttcagctgatccttgagcgccttggcatcatcgcccggaaatgccgtcgagtacggccgaacgagcagagggctgacggcgaagcgggctgcgctggatggtccggcagggccagtcacggccaggcggaggagcagggacgaggtggccggcgtccgggtcgcggtagaaagcaggctggcggcgaacatctgaggtttgtggtggaggcgagcgtgagatgggtgggagatctcaagtctgagagggcgagtttgcggtcgaggtagcgtgttgtggtcgagcaggagcggagggctgaagcggagactggcgggggcggcggcggcggagagggaggttcgcacactctgacccccctcctcttgccccaattgacctgatcaacactaggccgctctagagacagcatgctcgtccgacggcgagctagattccaggatgatgcgggactgctgctaacgagacgcactagcgagggttcgcggaggcctgcctcttgaaggctgcccggctgctcctgtctgtcgtgtgacaggcgatctagcccgagacgaggtcatgggaggcaggagctgaccctagtgcggcagggctgaaaagaggtcgctctcctaccgaaggtccgagcagtctgctcgagctcactcgatcagtgcgacctcgaacggcgtcgtcgcccagagtcctctgagttatgcggcctctcgaccggcggtctcctctcgctgtgcgcacgcctcacgaagagtctcctgggtttggccgaatctcgactgtccgcacatagctcagagttctcgcgcgcgggcgctcactcatgctctgagtcgtccttccacgaggaaggaagactcagaggcaagagtcgcctcggcgcgcagcaaccccgcgaacgtctcccggcaccccgacgtgccaaccttccttctcctcgaccgtttgcccatctgtgcaacattcaccggcagagaacaagccgctgactcgctcctaagccgctgaattcagtctcctgtggcccacacccccgtcatggggtaaaccggcccgtccgcgcgtcgagagcatgctgaagtcattttggataggcaagagaagttcagaggccactcctcctgccgacgagctctaattttctcagagctcatcgtgggagccccacgactcctggtcacccgaagcacctccaccctggtagagctttgaggtgatgggcgagacgaccgactggaactgggcgagcttctcctcaaaatcctcggccgtcgcctcggccgagttggcgtcggcccactcctggatgtccttgatctcggcaagaagcgtcttcttgtcggcctcctcgagcttgccaccgagaccctcggcgtcggcgagctgcgacttgaggccgtagaccgagttctggagcgcgttgagcgcctcgacccgcttcttgacggccgcgtcctcgtcggcaaactcctcggcctcgcgcaccatccgctcaatgtcctcgggcgagagacggtcgcggttgttggtgatgacaatctcctcgcccttacccgtcgccttgtcctgggccgagaccttcatcaggccgttggcgtcaatctcgaaggtgacctcgatctgggggacaccgcggggcgcgggggggatgtgctggagctcgaacctgcgccgcaaaagaagggtcagcaggagggtaaaggcagcaggcccgggaccgcacgctcgacttacttgccgaggaggttgcagtccttggtgagcgaccgctcgccctcaaagacctggatgaggacggtgggctggttgtcggcagcagtcgagaagatctgcgacttcttggtcgggacgaccgtgttgcgaggaatgagcttggtcatgacgccgccggtcgtctcgataccgagcgtgagcgggttgacctggagagggcagaaagaggcaaggtcagtctccaagtcgcacgtcgagcagcaagaggaagggaacgcacgtcgatgaggacgacgtcctcggtgccagcctcgcccgagaggataccgccctggacggcggcgccgtaggcgacggcctcgtccgggttgatggccttggagggagccttgccaaagtactcctggagaagcgactggaccttggggatccgggtcgagccgccgacgaggacaatctcgtcgacagcctccttcttgacgccggcgtccttgaggacctgctcgacgggcttcatcgtcttacggaagaggtcgatgttgagctcctcgaacttggcgcgggtgagcgtctcggagaagtcgttgccgccctcgaaggcctcaatctcgattttggtcgactgctgggacgagagcgtccgcttggccttctcgacctcgcgcttgagcttgcccatggcgcggaggttggacgagacgtcggtgccagtcttcttcttgtactccttggtgaagtagtcgatgacgcggttgtcaaagtcctcgccgccgaggtgggtgtcaccggcggtcgcgaggacctcgaaaacgccgtcgtcgatcgagaggagcgagacgtcgaaggttccgcctccgaggtcgtagacgatgatctgcgactcgccgcccttcttgtcgaggccgtaggcgatggcgctggaagacggactagacgtcagcaggggctcgcggcagaaaaggcaacaagaagcaggacgcacgcagcagtgggctcgttgacgatacggagaacggtcaggccggcgatggttccagcgtccttggtggcctggcgctgggcgtcgttgaagtctgttggcagcagaggaaggaactgtcagcggcctggccttgaccattagtagcctcgcgagcgaagcctcagacgcacaggcagggacggtgacgacggcgtgggtgaccttcttgccaaggtaagcctcagcggtctccttcatcttggtaagaatcatggcagagatctcctcgggcgactggcgggcgcaaaggagaggtgtcagcatcggctgcagaaaacggtgacgacctcggaagaacgcacgtagttcttgatgtcgcccttgtggtggacctggatctggggcttgccggccttggacgtaaccttgaatggccaatgcttgaggtccttctgaacgtcctgctcatcaaacttgcgtccgacgagccgcttggcgtcgaaaacggtgttgcgggcgttctgcggggcctggttcttggcggcgtcgccgacgaggcgctcgtcctcggtgaaggcgacccacgagggggtgatacggttgcctaagagcgtggaagacaaagtgtcagccaaaaaggcggctcgccgcaacgacatggagaagcaggcgaaggcgacgcaccctggtcattagcgatgatctcgacgcggccggcgcgctggacactgtggcagacggaaaagaagcgtgcgagaagagctaacgtcagcgcggcagcataaacaataagtgggcgagtctttaggcggagaacgcacccgacgcaagagtaggtcgttccgaggtcgattcctgccagaaaatagcgcaaaacgtcagcctgtcgtcctcagctgccgccttctcctactgctaggcaaaagacgaaccgatgacggtgccgaactcctcgtgcccgtcggcatggacggccggggcgaggcaggcgagcgcggcgaggcacatcgcgaagagcgagaaggccgagaagatgcgccggccagcagtggagcgggaggcggcgaccatggtggtgtggttgctgtagctgagagtagctgttgacgccgatgagtgagggtgtgccttgaggggtgaagccgggtgaagggcgagatggcggtcggagggctgagaaaagagggcggagtggcgcgcgtcgacaggcacggagatgagctggcggcccgagcgcgcgtgccagcgcagagggtgcgatattttatttttcgaccggacgcgctagactgttctcgaccgtctcgcctttcgcaccggcaggtcgacgtggaggtcgtgctggcagtgtcggtcggcacacgggcgctaagcgaggaggcaaagatttgaatcaagaagaaggggcaagggagcggtacaaggcaggcatgaagagataggcgttgggtcaagtaagggcggccgagcgagttctgcgtgcaggccggccgagacttgcgaagagagtcaagacggctcctactcctccatggcgtcctggacgagcgtatccaccgggaagatgtaagcaagccgaccagactaacacgaacgacagaaggtgggacgtaccgacggcttggccgcgctcgcctccgcaggaggcgcccgcataaacgcctcgagctcttcgtcgagcgcgtcgcccgtctttgctttccgaggctcgcgcgcctcgcgcttgccgccccgaccgccggcggctgcgtttccgccccggccgccgccgcgtcctcctgctcctccggcaccgcgcgcaggcgccgctccgccccggtgcgcacccaccccacgcggctcacgctcgcgctcgccaccgcgatccgcccgctggtactcgcgcttcggctcctcgccgcccgagccgaggatgccgccgagccggccgaggaggggcttgccagagttgtcgacggcgggtccgacggcccgaccgagcttgtcgacccggccctcagtcttgacggggagcgcgactgggacgtagtggatgcgaataggctcgccctagatatcagatgtggacgggagcagcgtgggcaaattataagaaaaggaaagggagcaggggatgctggttagttgcggcctgggtcagccttcgaagcacgtatagacgcacgttggcccgctgaccatcgagtttgtccttggcgagcgtcgcgtcggcgaccgagctgtacgtcacaaaggcgaggccggtcgatcggcctgcgcggtcgtactggaaaggagggcaggagtaggtcagcattgaccctatacgcaagcgaggcagtatcgaggccacttacctgcggaagggaaagaggagaagtgacgatttcagagtaagcgaacactgaaggggcgaggtatcgcgcgcgcgcgcgagaatgaggtcgggaccgagcagcggcggctaaaggggcagccgacggtcgtccaaggaggcgcgaggaggcctagactgagaagttgtggagagcgcggagcgaagctgagagagaaagcagatcgttgtctctctcagggtcgatccgggctaaaagcctcctcgaaatgacgagcggcgaaaagtcttgttggcctctgcgacgcccgcccagccgtcaccggattggcgagaggcagcatcggcgatttcgccaaagaagcccaccagctcgggcaggtagggatgtggttcgctaggcaggaggaggtcagaagcagggcctcacgatgatgttgggcttgtcgacgagctcgccggcctgggcaaagatcttctgctcgatagcgaggcaggacgagtggcgaggtgaagtcgtcagtcagacgcaactgcgaggaggacctgagaactccgacctcgaaggtggaagaagagcaaactgacctcgagctggaacggctggatctcgtagtggacgttctcgattctgagccgcgctgtcggccggtcggtcggtcggtcggcctcgtaccttccaccagagcgaggcgtgtgcgtgcctgagcccgggttggagcgtgcgccgccaaacatgtcgtgcttccagggagcgtcggccgaggcgggcggcgggcgctgttgtcgacgggcggaggaggaaggagagggcgacggatgtcagcccgggaaccggaagaggacgagggcccatccagcgcgctagtcgcccctggatctagcagcaagcttgtacaccctctctggcacactgcggccaggcgtagagagcgactgaccgagtagggcgagcgcgttccgctccggtcgccagggccagtaccgctcgccgttcgggcgacaccgccgggacgcccaccgcgaccgccgccgctgccgccagccggccgctgaggccgctgctgctgctgaggcttgttcttctgtgcgaggtcgtcgagcgacatgtcaaggtcgtccatctttgcgggaggagagaaggagatgagggtgagagagacgagtgcgtctcgccgacgcgaagggctgtcacagccggctcgtaactgctgttatggccgaggtgtgaacgcaacgcgcgcccctctccctcgcgtcgtcgcagggcctgctcctcctccagcatcggccacgaccctcgacggcgagagaagttaggcagcatgggcattcaaggccttctaccggtacgtctcttcgacccccgcatccgctggcggcaggtccagagtcgggctgccgcgctcagtgggttccacctctgggagctcggctgacgcgtcgagccttccctcgctctcgccctcgccctcgccctgccctacagctgctcaagcccgcgcatgaatggaaggagatggccgcgttcgagggccagacgtcggtccttctttctctagctcttcttgaagagagccgtcttgctgacccactcgcctcctgtctacccgccctcgcctgcccgacgcgtgctgcgcgtgattgaccgggaatctcagcctcgccgtcgacgtccgtccttcctgacctccctcgcacgccctcctcaactgacggcgctgacgtccttcccgcgctcatcctgtctggcaggcctacgtctggcttcacaagggcgcgttcggctgcgcagaggatctcgtcctcggccgaaagacgacgcggtgcgtcctgccccctcgcttgccctgctctcagcgcccgcttccgcttcggcccgacgagctttcgggccgcctgaggaggcgggctgagagcgagacgggtcaatccgtaagttcttgctgacatgttgacccgccgacctctccgccagcttcgtcgactactgcatgcaccgcgttcggctcctccggcactttggcgtcgagccttacgtcgtctttgacggcggccctctcccggccaaggcagggaccgagacggaccggctcgaaaagcgcgagttggccaagcagaaggcgttagagctcaagcaggccggccggacgaaggaggcttttgcggccttcagccagtgcatcgacgtcacgcccgagatggccttgcagctcatcaaggtcagtctgaatcgaccgtccgcagcgctagccaaccacctgctgatcttataacctcacactgcgcgaaggctctccgtgccgagtcggtcgcctacgtcgttgcgccctacgaggccgacgcccagctctgcttcctcgaacgtcaagggctcgtcgacggcgtcctgacggaagactctgacctgctcgtctacggttgccggacagtcctcttcaagatggacgccgacggcaaggtctgccttctcaggcgcgaccggctcggcctcgtcgggcccccgaccaggggtctgtcgggtgggtcgatgctcggcggcgaatggcggatggatggctggggcgacgcagagttccgacacatggcggtaagtccctcgtccgcacatgcaggttcacacccgactctgaccagcaccctcgtttagattctctcgggctgcgactacctgccctcgatccacggcgtcggcctcaagaaagctcacagcctcctccggcgcttcaagacggtcgctcgggcagtccagcacctccgactcgaaggctttgccgtcccggccgactatgcccagcgctttcggctggccgagctgacgttttgccatcagcgggtgtttgacccgacgaagggcgaggtcgtcccgctcagcccgctgccggacggctgtgcggctgacgaggacgccttcatcggcccgtgagtcaagtcccgacgtcgaggcacccccacgcgacgaagcctaacagttctctccccgttcgcttgcgcctgccagcaacattgacagcttgatcgcgcgagagatcgcagccggcgaccgctgcccgatcacccgtcgactcatcatcgactcgtgggtcgacttccggccgggccaagtgccccgtccggtcaacggcagcagcaaggctggccaggcggcgaagcggcctgcagcgcccgtcgttacttcgcagggtcagctcaagatcaccgagatgttcagtcagtctcgtaacttctcagcctatgctttcggaccgttgactgagcagattgacctccgccgctttcgccagaacccaagcctcagatttttcggccactcaacaacgccgtcgcatcgtcatctactagcgcacatccactcaagcggtcaatctctgccccgcagcctcggcgacctgcggcaacagcgactgccgcccagcccgcgcttcaccagtacgcgttcggtcagggcggggccgtccttgcgagccaatcgggaccggcacgactttcgcagctcgagagaggcgcgatcggcctctcgcagctttcggcgacggcgagaggcaagctgcgccagattgtgcccgactcgcaggtgctcgaggagcctggccttcctgtagcagtgggaggtggtgccagccgcttcttcggcggcggcggcggtcgacgtgcccagccggtgctcgcaaaggcctcgtcggacgagcctcggtcatcgaatcgctcgctcttgaccgacgtcggcggctcggcaagcgcacgtacgattgtcggatcaggcagtatgggcgaaggcgtcctcttgagctatccgaccggggctgccgctgtaccggcggttggtgtcgtgccctcgtcgccggtcgacgcctttgacgacgacgacggtggctccgacgtctcagtcacaccacaccacgcgctctcggtcgcaagctcgccgagtccgaggaagcccactcgtacgacaatcacgctggaggacgtgctttcgtctccagcatctgtcgtcgcgcgccagtacgagcgccggcgggacagcagcatcggccgcgacttttctgacggttacatctcttcgagtcctgtcggtcggatggcgaacggcggccctgccaaaggtcgcgacttcatcggccctccggcaggggcggcaatcgacgaggacgacggcaacgacggcgacgcgttcgagctcgacgtcgggccctcatcggacgcgactgtcatcgcgcttgacctccgccagatctgcgagtcgtctccgccgccgacagcgcacgccattgccgaggaggcggcggcagagaagcggtcgaacatgctccagtttggcgccgtgcccgacatgcgggccagcccgcactcggacagctcgcacatccggtcgtcaagcgacgacgacgacggcggcggcgatggacgtcgggcagccgctccgaacatgaccgacgccgacgacaacgctgacgaggcctttgagtcggaggcagcggccgaagctgagcgtcagcgcaggcaggcaaatgtcggagccagctggcgcaataaattcgcttacgccggcggtcggaaggtgcgcctgttgcttaatggtcgaggacgcctgcttgaaagaggcgtgtctgacactccgctgtctacctgacaacagagccttccgatggccgccctgagcggaacgacgacgacgacgacgacgacgccgctcagtcggccgcggacgaacaccggctcagctccacggccgctcggatcgacaacgaccaatgtgccgccgaccggggagcgcaaacggccgcggccgcccaagaacaccgagagcgctgcagctggtagttctttctcccaacgtcgcacagcagcatctcagccgccaaagttcacgccagccaacgttgctgacgacagcgatgccggcaaggagaacgccgccggtgctgcgacaactgccgttgtacggacgcctccctcgtcgccggcgaagcggcgggctgtcggccgcggtcggaagcgcacgtcggacgccgccgcactagatgaggccgacgctcgtcttgaggcctccgtctcgcctctgcgacctgcgtcgaagcggtcttcgctcggcagccaggtcccgccgacgtgggcctcggcgtcgacatcctcgctctcgtcggacggcgtcgagctggggtcgtcgcagctgagcagcggctcgcggagcaaactcgaacgactgcgcttccggccgacggcattgtgatgtcggcttcgcgtcgactggtgtggcctgcaggggaagagtactgtctgtctgatcactgtatgcaatctgtttacaacgagaggcgtcggtcgcggcagaaagggactcgattcgcatctcaatcgattgccctcttgacggcatgctcgagctcctccgtccgctcctccgtgagccgatcaagccaacaccggagcaagttctcgagcatcaactcccagccgtcaacccgcttggcgacgactgatgcgctgaagatgactgagcctggtggggcagagggtgagccgggcgggacgagtggaacgagaaagcgcagcttgatggcctgcaggtgcaccatcgagcgagtcgtcagcttagacgcagaacgtcggtcgaaggccatgacgcccgagagagacggaccgccgcaaactcgcgcagattttcgacccgccggaagaggtacgctcgacgctgctggccagccgcctccgagccgtcgtcagcgctcgaccgccttccaactggttcctcacggtctttggttcttgatacttcgaacggagcaggctgacagcctttcgacgcatctacctcgccgaggatgttgtggatcctctcgggaggaatgagcgcgaatggtcggcttgatcgccagacgactgcgttaaaggctaggcaaagcagctgaccgtcaaccagggcggccagaccggctgaaggaacgtcgtgaacggggttcggcggcaggtaggctgcgaggagcgagtgcatgcgatctgaggtttgatggagggcgaatcagaggagtcgagaccgacggccgacttttgtaatgcacgcacctgcgactgcagcgtccttattggcccaggtggccaagctgctctctgcctcggttgaggaattcctggagcccagcccagccgtcgtcggctgaccgtcttccacgctaccccaccctcggccgccaaagagaacgtcattgacttcgcgcaggaagatgccaacctcggccttgacagccttgagtgctggcgaggtgctgaacgtcaggtcggaggggtagaggtagccgagccggtcctcccagggcggcgtttcacggacgattggtgaggtcggggaagaggacgtctcggacgacaacgatggggacgtcccgcttgtgcgtgccccggccgagctatcgtcgcgagcggcgttgtcgctcgtcgacttgggcccgtcgttgccggtgtcgctatcaccgtcggccgttggtttgagcctgagcacttcttctgccgacctgagagcagctagaacgtcgagcgctgccctcctgatcctcgcgagcggatcgagagtcgttgcgtcacggccgccgcccgagagcgagcggctcatcgccatcggagcggtccggtgctgcgagttggaaaaaacgggtcgagagggcgtcgagaaattccgtatcgggtccggagctggtaggagcccactgctgctgctagtggaagctgaagagcggcgaccggcgccaggcaggtgatgattcggcacggcaagggctgagaagagagagttgctccagttccagctgtagctcaccttccctcagcgatagaattgcataggttaactcaccgagctcgcggaccgctcggataccagtcgccgtcgtcttcatgaggtcgagcacatcgactggcacgcattcctccgaaggcgccgccgtcgcatgctcgcctgatgcggtgtcggtcaagcctgacggtcgttccagcctaaacgtctgctcgagcgcgcggagcccccggactgctccttgccagtcaggctcgatgcgttttgccgtcgataggcgagtgggaaaacttctgcctgccggaccacgaggcttgatcggcgtcggagggaggggacgctcgaccggccggctgctgctgcgcgcctcgccatcgttgccttcgtcgacctcgttgaggccgacagcccacgtcttcggcccctttccccgcccatcagggtgcgtccggtgcgcctcttcgagctcggcgacgtgctgtcggccgagcttggtaaacatgtgcgtcaggctgtcgattgagccgagcgcgaggaccgactcgcgcttgcgggccgagctggcgaacggtcgaggtcgaccgctgctcgctgtggccgggtcgtctgttgtcgtcgtcgcagagagccgggagaacgggtatgtccggacggtgagcgtcggccgaagagaagacctgccagacgtcgatgatccttcgagaggaggtccgtcgggcgaagccgccgttcggggcgtcggcttgggcggggcgctcatcgcagggagttgagaggttgtcgctagcagacgggagagcgcgtcttcgagccaagctcttcttgtgcgagctaggccggcagcaacttatctgagagtgagcgagatggtgtcgagaggtcaaggcaaagcgcgagcggccaagaagacagccgcgctgcaatctcgcgtttgctcctgactacgaccttcttcccctgccagatgctgtcctccaagctgtccgagtccaatccgttcgccgacgagttcgtcctcctcgccatctcgcgctcgaactgccaagctgacttgttgcctaccggaacagcgacgacgacgagtcgatgccctggggcgcgccggcgccgggcctgccgccgccgagcgatgccgacgtgatcgccagtgcggtccgcaaggagaaattgatcgggttggtctttctctcgtttgcccttccttcctgaagcggtgctgacgccgctctttgtgtgatggatgggtgcgcccgatagggaggtgacgggcctccaggacggcctcaaggcgatcctcgccaaggtccaagcactggaggccgagacggccaagctcgcgcaggagaacctcctgctcgaccagtacatcgtcaacctcgctcacaaggcttaaggcaatggaggaggaggaacgttccgtcttgccatttgagcaggccggtagctcgaaggaggacgaggtctcggcgccgcgtgctcgagctcaagccgacggcatcgcgcctcgcctcgacacctccagcttgtaggaccgttctatgactttacgaagctggcaagatgggcgacctgctcgcgccgaccgttcgagcaggcttccgcctcatgctcggcaggctcccgtagctgtatgtcaggctacttgccgtccctaccatcaggctggctatcgactgacgccttgcttccgcccttttgactttcctctcgtgcaggactcatcgccctcagcccttggctctgtgtcctcgccccccaatcgctcgtcctgtcgcccaacgaatcgatgctgcactcgacggtcgctgcgccttcgattgaccatcctcgcgtggcctgcgaagcaaacccgggcccgggtgcagctcttggactctctcccgtttccctcgaccgctggtcgcgcaagatgatatgcgggttcgcttgacctctactcggtctgacaggtgtaacagtagagcctgtcgcgcgaggtcgaccacggtcgggcgagggagggcgagggacaaggtcggccttgcgccggctctgaagcttgcctcgttgtcggaggggtccgcgggtaaggcccatctggctgcctacccgctggttgagtggccttcgcccaaccctgccccaacacgccagtcggctctgccggctcgtgtgtccaaagctgtcgcccaaggcaagctgagcagggcagctcggctccttgcggacgatgcctcggtcgcccctctcgatgaggcgaccatccaagcactccgggacaagcacccagacgggacggccgacccgttcggctctcgtcgaggttcgcctccgtcgttgctgccgtggctggtcctcatcaaaggctaagatcgtcgcggctggcttagccaagtggttacggcggttgattcgaaatcacctcctcttgtagggcgcaggttcgaatcctgcagccagctgacctttttgccacttttgccaattcccgtcgacctgaattaactatcagagtgaggcggccggtggagccgccgacgtagttggaagcctggcgaagcgaccggtgtgataggcgaagctgcaggcgcaagagcagcaggagcgagggtggtagacgcgagagcggtcggcgcagggctggcggtcggtggagcgacaagcgtggagggagcgggcgcagggggagcgagatgaggagcggcgaatcaggactgccagtggaacaaccgaaagacagtctgcaggtcgaggagattagtcaggacggcgggccaggggtcgatggcagcagcactcggtgacgcacctgcactcgctggcttatattttagcgttatccttagcaagttcgacgttgaagaatcgctgatccaacgcccggcagcgttcgacgagctatggcgccgagcgggcgttggaccgatgacggatgctgacgaggcggggccgggaccggaaggcagcgaaggacggctgcaaagtcggagtgaggaagcacgggcgggcacgctctcgccggaggaccaattatgttgagcgaaggacggtacggattgagctagctcattcaccaagaagtggattatacgggagacactctttaagggttagggttaggtaaccgtaaatgctgatgcaatccgcgccttgacctcgcctaggatcttaacccccgacgcaaacagcccgaagtcgtcgacgtagacggcgagattcagttcctccccttcccaccgcagcgagtagaggctctggtccgccgtcgaccgctcgaaatcaatcgccgtgagtgcctcgtacagcttaaggtatcactgcctggccgtctgcttgaggccgtagaggcccttgtgtaggcggcacacccagtcctctttacccgcttcctcgaagcccggcggctgacgcatatagacctcctcctgcagctcgccgtacaagtaggccgtctcgacgtccatttggtggacctcccagtcgcgggaggccgcctcggcgagcagcagccgaagcgtcgtgagtttgaccacaggcgaaaacgtctcgtccgcgaagtagtctttgccctcaacctgactgaccgcctgagcgacgaaccggaccttatagcgaaccgtcaccccttgtgcgtccttcttctccgcgagcacgtctcggcagccaacgatgttgacgccctcggcctgggcaccagcgtccagaccttgtgcttgtgcagcgacgccatctcaagctcggcatttgccctccaggcggggccgtccgggcctgtcatacgcccgcctggtgagctactgcgagagccatgacgaaggccgctacgcatgggccgtcgaagctgatcggctgtgcgtgttcggtcccggcgaaaagggcctgcaaaatgtccgccggcggtttacggtctacacccaccccgcccctggatcacctgtcaacgacctttagccactcttcactttccgtcgacagtcttgccgacgtcaagaagacctgtctagccagtgcgatagcgtgcgttttttttttccgggtcgtgccgggttgcgctgtgctacgacgagcccgcctgctgacccttttcgaccctcgttcgtgaccccagctgcagagccctccagccggccctcaggtgagtcttcggcttctgctgggtccactggcagcccccggttgggtggagcagggcacttgatctcgttcgttgcagcacactgctgctgcccgccgaccgcaacgtggccaatgtctcgagcccctcgccgaccgccgcacggccgaccagtcctcacgccggctgctcctcctcgtcctccgagcgcactagggcgtggcccgacggtcgaagaggtgaagaggtgcgtccagctcgtcctcggaaaggacctcggcggagcgtccccgagggtcactcggttggtggggggggggcctcggaaatccaaaatcgtgaccttacggccgccgagcgggggcttctcttaggggcggcgctgagcaggagcagtggcggcggcccgtcgacctcgatctcggcctcgatctcgacctcgatttcaacccgaccgatcgccggcggccttggtacatttccggcccgcgccggtcccttttgctggagtacagacgctgcttggtcgtcctctgctcctcctgctgggtcagctccgaccggcgcctctttatcattctgctcctcggcttcctcggctgtgcgtgcatcctcgggacgctgtattatgcccacacgtgctgccttgcgtcttccatgtcgtcttagctctggccttcgccgccctgcggttgaccgccgagcaggaccgaaactgctcaaagccgattgtggccgactggacgaatcgctgctgcgacgtcacccagaccgaccaagacgagacggcaccgccctcatctccaccgtagccgactaagatgccttggaccgcctttgcagagaacacgctcgtccgattggctgctggtacgtgcacccaagcgatgtaggcccagactcgaaggtggttggagttgatcgccttgcccgtccaggcttggagagggatgcgaccgccgacggccgaccggttccgggggtacacgaacgaccgagcggccctgcccagaacgaccgaccgagctcatcctggagcagcgccgtcctcgtgccttttttgatcgtccgaacagctcgctcggcgcgaccgttctgaaatgcctttgccggccaagaacgcatcgaacgcccacgtcgcctggtcggctcgcccgagcgaccggcacaaccctgaaggtgcgtcgcgtcatcttgccaacgacgcaggcgtcgcatgctgacatctccttcggcgtcagctcgaagccgtcaacctgggccgccgtctgacggactcgaccgataccgacgtggccgagccgccggtgcgtaagctcctcgtcgatggctgacgcgctgacagcaacggctgacacgaccgcacctgggcgaacgtcccaggcgtacattgatgaccttgcgggcaccacggcgacgatgtgcccagcctgttcgacgacgcagccgcgcgcgtcaaaggtgcaacgcacgcccgacgccacaagatgggcgaccgagaggaggttgctggccaggctagggacgtgcaggcagtcttttcgaaaacattgaccgcgagcagccagagtcgttgtacgtcgttcctttggcgactaccgccatgacgacctcgcttgtagcgcgcagggccgcctctccccccaacgagcttgcagcataactgacgacgcgaaactccgaatcggatgaatccacattgccagcgacaactgcaatgctcgctctcgctcccacacgagcctcctgccgtgcagccgctcgggtgcggtaggcctccttcggcatgtgcccgacggggatggtggtggagtggatcgacgaggcgccgccggaggtcgtcgtaagggccgtccttcataccctggacgaccgacagggcgtgcttatcgtccgagacaatgtcgccgaggccggccagctgggcccggagctcggtcatgtccgtcaggtactggacggcctggctggcgacgtaccggagcgatgagtagcgatcgtggagggtgaggacgtcggacatggagctgcttacgaagagaaccttgaggtgggcgagcagaaacaccgggtggtcagcgtgggcggccgtgagggtgatgttgcggcaaagcgtgagcggggtctcgccgacggccttctggacaatgagctgccactcttgccagccttgagatccttcttgtctgaggaagggcgacggcgaggaggagagaggggaggggaggcaattgagccagaggccctcgctctgcatgtaagccttgtgcgtgagcgaccattgctggtagtccttggctcccttgagctcgtgaacccgctttgacatggcggaggtcgtgtctgtagggtaggggtcggtgggggaggtcgtgttggggcaagctcgactagctggcgaaaaatccggcgggcgggaccacttcttggtgacgcgcgtgatgtgtcgtgtcgtgtagtgtatagagtagcgtatcgatagtatcgggatgaagctatgggctcctaatctgttcagcgaaggatagtacggagtgagctgcctagagtgggggtcaggacgtgttacaaaaaaaagcggtctttagaggagcggaaaggtgggactgacctcagtcaccaaaaagtggactgaggtttccacggaagggagggaagtagaaagctaagagggagagagaaaagaggaaaaatgtcgacgtgttacggccgccaggcctgctgccgacgctccctctgcgcctcgcgccgcgctcgtcgcaactccagcgcagtggtcagcaccaggctcaataatagccgtaaaaagtgctcgttcacctgcatcgaattgctgaccgtctgtttgctgcgtcccgacaggccgacaacagcgaccgcaagggaaagaagcgcgccaagtacgcactgatgcccttggtcggcgttatttcaagacgttgtgtctgagcgaagtttgctgcgaccggaattacctcgctcccgactatcctcaagatgatcaaggcggcgctctctcttgggacggaaagaatcacgcttgactgtattaccagatgccttgagtgtaccaagttggctagcatcacgctcagctcgtcgacccacggatctccatgagccgccaattgacactcgtccagtggcacctcaaggacttagccagtggcttgtaccaactctttctttcccgtcggcgacgttcctctggtacggcaacaaggttgagcttttccttctcgactgtgccaaacaaagcggcgcacttggcctatctcgcatgtaaaccttgctgtgatgactgtacggaagacagcccgcacttggtcctgctttcactcgacaataatcagctctgctgttgtgcgacagttgactctaagtaagaaaagggttgactgactgatgtgcatcagcatgggcattaggttgaacacaccgtcgatctcagaggtcttggtgcgccggataggtaaagcttgaggatggtatttgggaggttcaggtcagggcacgagctcgtgggtgataagcaatggaagtgaagccaacgcaagacaagcaaaaagaaaagtggcgccacacctgggcgcgcaggaccgcaagcgtcgggtcgagcttgaccctctggacaacgtgcgaggtgtactcgcttcactggttccagtcccggacgccgaagaagtgggcgacaggccagagcgggaaggtcagatgtcagtctggaaagggagttgacggaggggactgttgccaagaggggtgcgaggcgcggacgagtgacaaacgtgagtgctcagcgttaatcgtcgctgacgtcgtcgcacgcttgaccttcacacgtgtaactatttcgtcagtgcaatcaacataagaaaaatgctccaaatccccgagcagatcaccctcgtgcacgcgcttgccccactgacgcgaccgcttttgagctatactttaagccggtccctgtcgtccattggtcgaacctgcagttcaagctttttcagtaagcgcttttcgccggctcgcgcctgtctcagccccggtacgtcctgaatggcccgtaggcctcacgtcgggcaccggcgccactctcggccatgcatgcaacaaggccggcaaaattataccctactttgacatcagtggccgatatctgcactcgtccacatttgctccctctgataccctgtgcatctccgcagcagtgggtcttgaataacaacgccgtggtacgtgaacgcttgccagaacgtccgcaagcgcgacaagcccgagcccacgctatccgaggtgccgttccgtgaccaggcccggaacctccgtgagatatgaagcccttccatttcctccctgctctcgcatcgcgatggcttatcagcgcaatcgtgctcggcgaccacaagcgccggcgcaatctcgagggccgcaagctcgtgtccgtgttataggcaagtagtcgttgtacgcattcctgcaggcccagcacattgtccgaaactacgagttgttgcagcgactttggtgctgggcggtaccatcctgctctatatcaccgcagcggcatcgccgagaccaccaacaactgcctgcaggcccgcccgtatccagacttgcaagtcgccggaccgggagcgccggctcgagcctgcccgggtcacctccctgaagcggcgcatcctcaaaaatgtgccgatcatggcttcgactgcccccacggcgccccgggagggcaaccgactcagcttttcgttcaaggcacttaacgacaggagaagctaagagccttctcggcctcagcattgactcggaccgccggatttgtgagtggcgcaaattctactccaagtggtggaggatttgaagtttggtcgctttttgtgtctagagctgttgtccgcttcgagttcggcctagttgtcgtctgcttgcgctatttgagcgggactgtaggccaacaaatgatctcgaccgatcgtttagttacggaccggcgtcgtggaccagccacttgctcattcgtatcgacttaggaaaaggtcccagcaaggccagtccggccgtcttgagaacccggatggccttcacagagcggcgcatttcctaccgagcaagcctattagctgccggccggaaagttgaccgcgaggttcctcgcttgcacgaacgatgataaacgtctccagcgtgaaagaggtgccgagaagagcgccgttgacggacgccagggtgatctgggtcaagacggcggccgggggcaaccgcggacgagtagcccagcttctgctcagaatcggcgtcggactccgagcccgagctgccctggctctcgtcggaggcgtcacatgcaaaagagggaaagagtgcaagctggtcatgctccgtcgagacttttggctcgtcctcgctgatggatgcggtggcgttggtcgcgctcgtgggaaggttggacgtcgtggcagtttcaaggcatcaggagaacatggccatggtaaacgacgtcgttgtcatcgaggaccggtgtgccaattcgatcattccctacggcacaacggtctcaaaggcgacaagtgctttttctccgtcttagtcaaggaaatggctaccaggattgctcattgcggaacggtcgcaatcgtcgagagcgccctcatggaccccaacgcggtcccgaaaatccttggtctcccttcatttctcccgttcatgaccgctaacctgcatcttgacaattgcgaaacttgtttagcctggagtcacagcatggccatattgtttttgttgtttggtccggaaccggtttttgcccggataagatgaacgcaatggaagaaaactagactgtcactagattgacgaaagcaggcaggctcaggatgagactgtactttattatatccgacaggctcaggatgagactgaactttatcatatccggcaggctcgttgtggaacgttgtttgaggatgttcagacgtatacacctccgccgcccagcacagatgacctttcacgcaatgagcggattaaatgtatgtagaatagcgctacatgatgcactttccgcttgtgtcgatccacgcctgccaatattgcgccgcacgtatgcgcgattacgcgtccctgctccttacagctaaagcacgtgaagtgatcgatatgagtgtagcaatgtctcgggctgagagcgaattgctattatccgacagcagcgcttggtatgttcccgttttggtgatatcaatcaccgcccaatttcaaattcaaagaggattgcaactgtgcatctaaccctgagatgttttgtctgttgatcctgagctgtctttttccacaccgttgtggaaaaggttgagctcgcatcggccaggtcttaccctgaggtgttgtcaagaaggagtcaagcaatgctctgagtttcacgatttcgaccgcgtgtcaagacttcgttcgggtcagctgtccgaagcaaaaaccaaaagttatgtacgtgcgacggatgtaacagatgaaatgctagattttgttttcctagactgctcaaggaaggacataattgatattcttgagctttgttattggcggacccatctcgatcaggaagtctcagccagccactgcacgcgttgaccagccccccttgagccctgtacagcctcacaattggccgcccgcgtcgtgcgtacatctctctcgtcgtcgctcgccgagaagcattttttggctttggatcaccgttgacgaggaggcgcttgcagttattgacacttcaatcatacaatgttccagaatgaatgcccagatcctttttcaatctatcttttctgcacgtcaggttcactcactacgacagccaagcattatcgtcacagctttgccgattaccagatcaaccttggcttgccgtcagggctaaatgctcttgtccatgcgctacgtatagtttcgtacgcccatcgaaacggtgagagaattcactttctttctaacaatttcatacgccgacttgtcatcattgacgcttcttcttcatgcaggccaaccgcttcgccccgtcttaaatggcttcgagaaactgctcgattagaatatccgacaccatgacagcaatgatgaattgtgtcccgccaatgaaaacgttagtgacgtgaaggtcttgtcgaaaaccggtgtgctaatgattcaatgttttggaattgaccttgaggatacgtacgtcatgcattgattggggcaatggcagcttggccgcaagtgagttcaagaaccaaaatgcctcggcggtgcttattgccatccgactgcatcgttcatgtgatggtagcgaaagggacagcgatgtcgactctaatattttggttggggcagagctaagtcaaaccagttgtcgtgtgaccattgagtgctgattagttcgagatcaatacaacggcaaaaagggtcaggagacggataaaagtcgcgccaacttgtgatccggtgtgactgactttctctctcatagccagccatgcctttcgcctcatcaagagcaacccgcaccattctctgttggctgggcgttctacatcagcctgccataagagaaggaggaagggggctttcattgcccgaccctaaaagttaagtcaagtgaaagacctgcgagcgatttctttgaaaaaaaattattgcacctatcaagcagcaataccccttcggcactgacgcggccttgttgagaccgccgacattctcccttgcttcgatcagcaatcgcgtcaaatcatcaatcacattgtttgacctttaggcaatccatccgctgcaacaccaaattgacgtatctgaggattgcgaaaaatcaaaacccggcatggtccccggcctttgcgtgcaagtgcgcagatattgtgttttacgcgacaatttgactcactaaccacgtagttagcgacaggttcaaatcagctcagccggcgtcaggcgaccagcgttgcgtctacctcaggttgagtcgccagccagagagagccgtcagaggagtcgatttatgactcgccagacgaggcctggacgtagtaggctcagggcgaacaggcgctgtgccagtcaacgaaatcaggcgagcacaaataggcgtagaccgaccgttgcaagcgaggtaacgcctggaggcgctggagaactgagtcgacagtcaatccgggcttgaatttgctggtccgagattgctgccggcgttagtgtgtgtactcaggtcgatgagctcactggagtcggaagcttgctggtcatccgagagcgctgtctcggccgcgtcttaacaagagggtggaagagagtcagtcaaagggacgcccagatgatgggtgaagaggcaagtgggggacagtctgagccggcaggcaaataggaatgatgagttagtcgcaagaaaggtcaagggaagggcctgtctgaaagacggcgggagtgcttcggagatgcttccctccgcgcgccaaggggaaattggcggagcagaggtctaaccgcctctgtatctgcttgccatcattctggtcggtcctccccctgctttcgctcaactccgggacggtccttctccgttccagccagctccgaggtgcttggcctccgttccgcagcggcgctccttctctcttcctccagctcttccagcgctgtaggagctctttaggagctgacttctcgcttcgtatcctttctgcacctcaaaggaaactcataagtcttcaccctcaagtcatcctttccactttcgcctacacccccaccgagccggtgcataccagtatctcacctgaaatatgttccagtatcattccagtaggcatactggtacggtaagtacttgtatcacgctggtgtgcctaataatatggtgctgtatgactactggtatggtactggtagccaggcctcttaataccttaccactatggcataccggtatcataccagaatgttttcaacctttcttcgcctgttcaacacactgacccctcacaacccttctgaagacctccctaactacactgatcaaatctagctgacatccgctttgttctgcgctcaggagaggcggtcaagctagtgcggaccatactggtatgatattaggatgcctactggtaaggtaggaactggtaaggtacgaacgggtaaggtactggtatgactactgggatgacataactgataccataccaatatgcttcttgatgtgacactggtatggcatgccagtacatgtgttgggtaatttcatgatgatgtactgagtcggaggctatgtactctccactcctccgtccccctagtcgttgcccggccttcggctctccgtcctcggtcgtcacccttagacctctcggtcctccgcttctccgaattccggccccggaccctcaactccaaaccccgaactccggctcagcactcagccaccggaattccgaccttccttcggagctccgtgacagtctgcggtcccagcggagctcctggctggtcgcattcggtcggtcctcatgggccaaccgatgttggcgctgctgccggacagcacggatgtagcgttcatccaaagacgataggtgcttactgcttccaccgatcgatactaacgaccacggccgctgtttcgctccgaacggtcggctgctctacctcgcggagttcagagcgctcagcacacctcgaacatgctgttcggttggcgtgcctttgcagcccagcattggttccatgtggcagagcggctccgggcggccgacacggcggaggggcagacatttcgagaggactactctgttcctctacaagaacagttcatttagtcgctcgttgtggagatgctggcgacgatcgacgcgggcgaggcggttgcttggtctgacgacagcgtgactgaggacgaccggacgagccctgactcggtacactcaaccgcatctgtcccccaccttctctcgctcatcggtattttttttttcctttgcagcatccgatttaacaaatttctcttccttcaccctcgcgacaacatctggcgggccatgcgattcatcaagggctggtgggtcgcctcgaagcctgggcgggggcgggctctgcgaaaagtggctgtcgggcgaccagcaccgcttccgcttacgacaatgagctaaccttgcctgctctgcctcctcagtcgacgactccgagactcagaacgtcgcagagctaccaggtatgcttgatgacgctcggtctgccgagatcaccttcagcagtctcatgtcctacgcatacaacaaatttaaagacctctcagccaaggcggactcacgccaaacgaattgagcttaccgagtcatcctgttcgacaggtcgcgtcgccacatgctcgatgcgtttcgacatgctcgacggcgtcgaccgcctcttcaaggaagctggttgttgcgctgtgcgtacgactggtcaaatctcagcaaggggtcgatcgctgacgagcctttgtttatctccaaaccctcgatcacgacgagggcgagagcgaggttgacacggcctacacatgcgagcagcgtgcgatcgcctttcagacgcccgagcacctcgaggtgcgtccccttgccgcccgcagctttgtataagctctaatcacacttactctcagtagtcgcatgcgaggaggcaccttctgctcgagctcggtgaggcggcggacgctgatgagctgtccaaccagtcgaacaatgactgctctctcgtcggccaggaacgcgcgtgggaccggagcagcgagtcggctgtcaaggatgacatcgctgccgatggcgacgctcggagcgagtgtagcgaagacgtcacctatgacagcagcggcaacgacgtgagcgacgatgatgttgttgaaggtgttgctgcgccagtgccggccggggagcgcgggatctcgggcgcgcctggtgaccgcccagcggccatccggggcgccgcgccccagaatctgctggacttcttccttctctctttttttgctctcctcttctgaggtagacgcccactcgctccccctcctatactacagtcgttcacggagtagtcctgagactgaggtacgttcgctccgccgagtcttagtcccttagcctagacagtagctcacccctaccgtagtccgccctgcctcctgtctcgtcctataggtgggatctatgagtcgttgtcgttgttcatcgagtagtcctggaactgagtcggctctgcctcctgtttcgtcctaaactccttgacctccttgagatgagatcaaggcccatgaaaagcgctcgcgcatgacgtcccggctcctctctcggggcgtcccgactaaggacatggagcggattcaagttgtcgaatctgaggactcggcgatcgtcctcgccgcgatccgctcataacacaagcttagtggcccggtagcccaggtcgtcccgctcgagcgcctaatctacctactcatgaatcaacgagggcggcgacgtccgtgcctttgttgaggcgaactaacaacttgaggttgaagccacccgtctcaagcctggccctctcgagcggcggacctccgctcgctctttgtcctccacggcctcccccactccttcaaaaccttccggaccatcttcctcaatgtacgaggcgacggcctcgtctctcacgccggaaattttgctctccgcaattgccgtcaagtcctagacctactcgacgctctccagctcggcctcagtcctcacgccgccgtcgcgacggtcgccccggcaccctcggcacgcggaggcggcccctgctcgtacgggggaaggtcacatgacgccgccggctgtcactccaagaacggcatgcctgctcgccctcccatcacctgaaaggaagctcgcgccaaggtcaagcagcgccaggccaagtttgccgaggcgacgtggggttccttgagcaacttctgttgatccgcttgcctcggtccacatgtcattgactgcctctctccttcctctcgcagagagatggacggcgaccaagacgttggcggcctcatcgtgccagcctgcacgggatgcgggcaggacggctgaacggcggccgccgggcaaaggcggcggaaagacagaaggtcggctatggagagggcgtcagctctggcgtcagcttctgtgtcaagtcaaacgatagtgtaggaatcgtcgtgtgaggctgtgaggagagtgatctcgcgaatacgagacatgcaatttgggctcctgatggagaccaaccgcagggctgccacgactccctggttgtcgcagccagaccgcacgtgacggtcccccttagaggtgtctacagcagcgcagggcatgcaggatggcgtaggccttcttgaattggatgtatttcatcacgtggcgctccggccataggtgttagggtgcaagtggcgaacaggggggaggctggagctctgacgggcaaggacgagtgatggggggaacaaagaggcaagcttgagattcaggtggcggctcgaggtctacaggggtttaagtaggctgaagtgtgatggcgaagaatcttctggaaggctgtgcctgctgacggatccggtggagatgctgactgatccggtggagatgctgactgatccagtggagctggtgactcacgccggcggagctggtgccggagaacgaccggcggccgagggttgccgggtctagactcggccggtggtgatcgggtgtcgcgctggaggttccacgtgaaggttgcgaaccggtgacgggtggggaactggtagtgcttgacttctcttctgtcgtgcgggctgaggccctgggttcgaaccctaagccggggatttgctgttcctggcaggtcgaaccatgacaataggccagagaatcacgcgccctcaccctgcaaccattaactaaagccaaggacgccgctagcgtctgcgaagccggtaagcgggtctagttcctgctcaaggagcataaccccggtccatgcatttgcatgtacgcgccaccgttcgacatcaagccgcgcagagcgcggcaagtcgcgtcgaaatgggtggtctgcgggaaaggaagcagcgaagtcgtgaaggatgttgaacgacacggtcctgcaggggacaaggcagtcgggggaacgcttaagatacacggggacttgcgccctgaaaattgctatgagggaggaagccgtaagggcaaaagagtgatgttacggagggaggtaaagcgtgttacgttcgatgaagcgtaaccctaacttccggcgccgccgcgcgggcgggcgctgcagcgtgccggcgctggcgaccctcccgcaaaactaccaccgacgctctgccttcaacacaggatgactcaggaaggtgtgggtgtcgggggttacctgcgagcagaacgtcaacccttttccatcgcctgtctcctgcagcttttttaccgcctgtctggtgcagcttacgagctgccaacgtcggatatatcgttttactatcgctagtttgcgtcgattgctgcccagctcctcgcgcgccgaccggcaccattcctattgacctccagacaacacctttgccgcccagcaccctcaagtagacggaccgccttgtgtcagcgctcctgtcctcgatcctgcgcttatccttcttccctgctcacctcaccgccaccactgaccagtcctctaccattcgctccgttaccagcgcctcgctcgtctttgttgcgtccaggctttgatcggttgctaccacttcgcccggcttaccctatccggctgtccggtgcgtccgtttcggctcagttcactggcagccacctccatgcgctccgccgacgcccactggtagcttttgagctgacgttcaaaaggggccgagctgatttggtcaagagaggttaagcacctagttgaggcgcagctcctaatcgacgaattcatcttgttcgcaagagtttcgaggcgaatcgaagcaaaaagaattatcgccgcggggaatcgaaccccggcctagtgcaaattgccacatggcaagcaccaatgaataccacttcaccacaacgatcttatgatgatcggaaacagtgtcatactatgcgtaattttactgcgcttgagggccgttgcgttgcagctctccgtcagcgcatcgtaaggctcagaggatcatcggcgtgaaaaacgtcgtccagttctagcggctcagtgggattcaggccccgagagtgctggtggtcacggtccttgaggaaagaggaaaacaatggggtgaacgcttcacattgattgaggctctctggcgcaagaggaggatggacgcggggaaatagagggaggttgtaaactaggcgcgaggcttaagtaagttgtaagaggagtgtgacctttcgaccaggcaaaaccactcggaagatttttccaggcggaaaaatgacgtgggggttgtagatgactaaataattacggagccgcacgctagggggagagggctctagctagccgctgcgcgctggcgctgtgcagcgcgccggcgccagacgaccgcccgccaaaccgccccgacgctgcctctccaacaaccagagcagagtaaggttacgcacgatgttcccaaacagcgcgtgcattgcctccgcctcgtgaaaagggtggctcgatcgccctcgccaggtacgcctcccaccgagcccaagcggtcaccgagtcgaaaagcgctttatatggacggcctggatgagcgtctgtcagttttttatgagtgagaaagaaagaaggtgcgcgaactcaatgtcagcagagagggtcagcaaagcctgcttgaaccggggcgggagaacgacgttcaagcaaaagatgggcggctggggctcgccaggctgcaggctctcctcgccgggcgctcacgccactgccaccaatgccccgccaggttgatgtcctcaggttcctcgaagaatccttatgaaagaccataatacaggagggaggtggatggagggtgatctgggagagcaaagcgagctgcgtcagctgggctttgtcggacgacgcgcacagcagagctgaagcggaacacttgcagcgggcgggcaagggcgagtcctcggcgagacccaatacggcggcgatttgaagggatgcgtcgcgaggaggttggaagctgtcgggggaggagcgcttgagggtttgacaggccgcaggcgcccaggggtcagaccctttgaccttgctgcagcgcatcagtgatgatgcgaaattcgatcaaaagtcagatcagataggcaaggtctttgggtctcctcagtcgtctaccgctgcatgacgctcaaactgcagcgggcgtcggcgttgcgttgccatggcgaccagttgacctgcgccgcgggactctcttggctatgcctcgccccttcttctggctgctcaactttagcgctgtcagagcagctgtcagcggggacggaacacatcccagtgcgcaatctctccctgtctcgcggtctgacagtgtctaggcgcttcgagcagctgtcggcggaacaaggccgccggcccgactcagcagcgcgcagctccgctccgaagggacgaccttcgcccgacttcctttcgctacgtcccttagaaagctccatcctcgctctctgctcgccactcaccaccacccttccccacattctagtccgcctgacctctgccagcgatgagcgtcctcgagtcccaggatctgacccctgagtgagcttgatctcgcctgccccagcagctccctccgagcgctcgccttggcatctcttttgtagcggaccgtcgatctcgccctcgggcacacgaactgaccttgccctacctcgccctctgcctagcgcgtccgcgcacccacctgtctccccgagtcatgagcgccggcagtccaacctcggtgcgccgcgtccggagctgctctcattgccaccgtcggccgcccctccgacgctcaagctcgcgagctgatccagttttccgcccgttgctctctgcagcccacctttacgacctgacgtcgcctctcacgcggtccaaggtccgtcgttccgactgcttctgtcatccgtccgggtgtcggcgttgtccgatcagaggctgacgcgccaagcacctcgtcatcatcgcctccgacagacgcccgagccagcgccgacgccctcggccttcagcgaccccaagattcctacatacgggacgacgatcgagtcgggcggcgagggcggaggcatgaacgtccttgtcggctgggagtgagtcgccatcgctcacccgtcctgcagagtcgttgaaggcgccttgtgcagcagctagccaaccgactgacgcttcgaggctcctttgccgtcctcgcatccagctcgacgaaggatgcgaccttggcctttgagcagtgcgttctcgcagcgcctaccctcagcactcgcttgtttggcctgacgaccgacgctctcgcaactccagtgttctcaacaagatgtcattcgcgcccgccgaccgaatcttcctatgcaccgttcttccgacgctgccgtcgtccaactcgtcaatcctctccaacccgttcacctcttcctcctcctcggccccttccccttcgaccccttcaggccaggcgccgacctcgcacggctcctccatcgagaacgggcccgactaccgcacccctaccgaggacgagtccaagcaggaccgcgacttgcgcgtcttcaaagagatacgcgggagcgcgatggaccgtctcacgggcgaggcaactaagctcaaggagaaaggttgctcgatcacccccgtcatcgtccatgttcgtcgtccggtggctcaggctgtcgcctttccttgctctcactgaccgccgcttgtttgccgctgcaaacgcagtctgacgctccggccaaggcgctctgccagctcggcgaagagcatgccgtcgatctcattgtcctcggccgtcgccggctatcaaagtcagtccctctgatcgctcctcctgcattggtcgcctgctgactctgctcgacctgtcgttcacaggctgcaccgggtcgttggcgccggcagtgtcgggaactactgcctggcccagggcgagtggaacgtcctcattgtctgtccctctttggctgtcaagctacgtagggccgatcaaatcgctgacgctgcggaatcttgggcaatctacaggtccagaagtgatgccgcaactgctccgaccttgctcttgtcccctgctgaccggctacgcagatcgatggactggtacctcgcgctgccttccggagtctgcttaagtgtctgttgtgccgacacgtgagtggagcgacgtatcatttcgaacccgcgaaggcggagagcaagatcatcgtgaaaagtctagcccgcgaccctcaagatagtcgacgacggcggcgttgctgccgaggccgttgaaccagatccgctccggccgcgcaaaatgtgcctcaagcatcatggcgaggtgcttgtggctgcagagtgaccctggtcagccgtctttccaaggtatggtctcgaccagaacgacgtacaagagcccgaacggaagcgaatagtcgtccgacagcttgacaaagctctgcgcaagggacgaagggtgtcaggacggggtcgtggaatagcgagcattgccgccgaagacacacctcaaccgcctcctggggcgtcttgtcgtagccgcagaaaagcgccgggtttgcgagcaagccgcgcgcggccataacgcctttgacgcccgtctcacgccgcatatcgaccgcgtcctgggcgacccagatgtcgccgttgccgattgtcggcacgccctgcgcatgggcgagcgaagccgcaaaggcaatcccgggcagcgaaggggcgaccgtcgacggctcgaggcgcgtccggccgtgaatcgtgaggtgagacacgccggcctggatggctgatgacagatccgacgagacacgttagcacgcacactgcaaccgagacggcaaggagcagacgcaccagtgctaacgagttgctcggtgtaccttcgcgtccgaaggtggctcgtcagcctcgctccacttgtgacagacgcagacctcgcgcgacttacttcaggtccttgtcgatccggatcttgacgctaatcgggtaattccagcctagccgatccttgacgccccggacgaggtcgcgcaccttctcgggctgacgcagaaggtagcagccaatcctgagtggcagagggcaaggtcagcggggcgcagcacggcctaactcaggttacaaggactcactcctcctgatacgcccacttctgtgggcagccgcagttgagatcgatgccgtcgacaaagggttctgacagcggaaggaataggtgtcagctcgaaaggcaagcggtggacagggagacgacgcggaaatgggcgaacggatgagttctgcggcgtcggccaggagcttcgggtcgttcgccgcaaactgagagacggcaaagctagtcagcaaggctcgtgaagggagactcgcagcacacacctgggcgatgagggcgcccttgaccctccgtcggcggcccttgctgacgaccgctcctccggcctcgtcctctgcgctgcgcagaccctcgcctttgcgctcagccatccagaatgcgccccgctcctctgtgctgaagctaaagtcggactggcgggctgtcaagttgcgtgcaaactcggcggcgagcatcatgggcgtgtgcgtgacgtgcgtctcgtactgggccgtcaagtgtcggaaaggtagcttcgagtggcgaacgagcggcgctgcaggcggagagggcagccgtcagcacccgtgacccgtcgcaaggagagtcctagctcgcgcgcaccgagtacgttgacctcggcgaactcgtgcagcatgtcctgcacacgaaggacctcggctggtggcagcggctcctgctcctcgttgccgtcgaggtgcgccgcggcacgagcggccgccgtggccgacgactcgccgaggtcaagagtcattgtccgagctgtgtacggatgtggcttcggctgccttgaggagctgcgtcctgctttacaggagagggatcgggtcgtatgacggcaatcgtgcttgtcgaaaggaggtcgctctctgggctgaaggtcgaggcggagggaagcgtcgttcctgcgctctgactgccaccatccgtccctgacctccttccctcccactttctcccttcctcgtctctaccaggtaaacaaacagatggaggctcttttcttcaacgtgcgtcctcaaaggatcgactctagctcaaatgaggcggctgcagcacgagctgggtcgtctcaccgccgccgctggccgctccgacctccgccgcccatcgcaccaagccgtgacgctcttggctgaccgcttgctgccttcttccttcaacaggccgacgcgggcttccttgagggtgtcgtccgaggctacaagaacgccctcttgacgcaggccaactacaacaacctgacgcaatgcgagacgctcgagggtgcggcccgacccttcgcaccgcagggtgcttcagctcgaggcccccttcatgccgcctcgagctcccagagcactcgtcctgacgaccgcgctcggctcctactccagacttccgtctgcagctgtcatcgaccgactatggcaacttcctcgcgaacgagccgctgccgctgagcacggctgcgatcgccgacaaggcgaggcccccttcttcctcatacctcaggcacatcggtcgcttgctgactgccgtcgcccccttgatccgaacgaccaggcgaccgaaaagcttgtctccgagttcaactatctccggatgaatgccgtccagccgttggccaagttccttgactacatgacgtgcgttcctcgtccacctgaggctgcgcgccggaccgagatcagagcctgcactgaagctgccggacccttgacccctctcagctacgcctacatgattgacaacgtcatcctgctgacgctcgggacgctgcacgagcgcgacacgcgcgagttgctcgaccgatgccatccgctcggcgtctttgacacgatgccggccctgtgcgtggcgacgaacgtggaggagctctatcagtcggtgctggtcgagacgccgcttggtgcgtccccgccacgaagctggcaactgctctggcttaacgctgactcccaacctcctcctttacaacagcgccctacttccgcgactgcctctcggcgcaggacctcgatgacctcaacatcgagatcattcgcaacacgctctacaagtcgtatctagaggacttccacgcctttgtcctaacgctgccgggtccgacggccgagatcatgtcgcgcatcctccagtttgaggccgatcggcggtcgatcaacatcacgctcaactcgttcaacaccgacctctcaaaggagcagcgcgctcggctcttcccggcgatcggcaagctttaccctgagggcaacaatgcgctcgcccgggccgacgacgtcgaccaggtcaagtcagtctgcgacaacgtgatggagtaccggcccttctttgacgccgcccagacgaacggtcacggcaactcgagcgacgagggccagagcctcgaggaccgcttctttgcctacgacgtccacctcaacaagatgaccttcctccagcagttccagtttggcgtcttttactcgtttgttaagctcaaagagcaggagatccgcaacctgacgtggatcgcagagtgcgtccctcgcttacccgtctgctgctctgccccatctatgctgactgcttctttgccctctgcctccctcaggtgcatcgcccaggatgcaaagtcagtcccccactgctgccagccgcctcgactgctaatcagactgaccggcctttccccgtgcttgcaatcagggaccgcgtcaacgacatcgtccccctgttctagacccactcagcgcccttctcctttcacgatgcatgaccctccgacgacgcctgagctcagttgcatcctatgcgcacgcagcgagcttgcgagaagagtcatgtatggcgaggcgtctttcggaagcgtatgttcgttgcgcgggcggacagggggtcgtgacggggacgggagggatgggagcgagagtcgggactgggcggtgtctgaagtggctgccagaagggcgcgcctagagacatctttagtcgagattgtcggggaccttgagcggctcaatgttccagacggtttcggcgtctgttcggtgaagcggtgcgttggtgggtcagggtgaggatgagagactgagggaaacggcaggacgccggcagacgcacacttcatgacggcgttgtccgagctgtacttgcccatgctcgacgtcgtgatgatcgacttcttgacccaggactcctggtcgaggtaggcctcctcgatcatgcgctgggcatcaaggtaggactcaaagtcgtctacagggagggaagcagcgtcagcgtgaggcagaacggctttggcaacacaagggggacgtacccgagacgaggtagtagtcgctgccgcggacgttgtcgagcagcggcgcaaagaggccgccgtggtcgccaaagacgccctgctcgatcgcgcagaaaacctgctcgagcgccggcgacttttcggcgatcggccgcgggcggtactggttctcgtggcgcttgccggcgacgtcgggcgcgaggtggccaaacgcaaagcactggtcgtcgcccgcatcggcgatgagctcgacgttcgcgccgtctgcgacggggtgggtggtgcgtcagcgcatgtatgccaatgagcaggcaggacgggcggacgactaaccgacggtgccgagcaggagcgcgccgttgagcgcgagcttcatgttggacgtgcccgaggcctggagtgaaggaggaactggttgggtcagcgacgcaagcacatcgttgaaggggagggggaccaacctcggtgccggccgtcgagatctgctgcgagatgtcggccgccgggatgataacctcggccagcgagacgctgtagtccggaataaagactaagggggagaagtgagtgttcagagcaagctgcaaaccttgagcgaaggtgggcgacctaccgcacttgaggaggtcgccaatgtccgggtcgttgttgaccgtcttggagacgacgttgatcaggcctgcgttgaaaggaaagatgcgctgtcagtcactgggtagccacccaagggctgctagcgagggcgctcttacggatacagagcttggcgtcgtagtagccaggcgcggccttgccggcaaagatggtaacgtgcggcgcgagcttcttgcgctcggccggcgacatggccttgatcttgagataccgggcaatgacgccaaagatgttcattgtctactcgaggcgaggcggtcagcatagtcgaagagagcaatggcggaatcaaaggagacgcacctggcgcttgtaaaggtggatgcgcctgggatcgagcgtgtcagtagagccgcctcgctacgaatgagtgacgaaagacaggttcgcacttgatctgaacgtcaaaggccgcgtgcgtcgggaccatgatgccgagctcagtccagatgagctcggccaggcgctccttgttgcggagcttgatggcgctccactgcttgcggaaggcggcgtcctcggtgtgcttcgtgaggcccttgagcagcgggaggtccttgagccaggcctgcgagccgagcgtcttggtgataagggcactcagctccgggttgcactggtcgagccaccggcggggcgtgatgccgttcgtgacgtctgcggtgaaggaggggacggtcagagacggcaagaggccggtcacagagcaagatcgatcacgacgcactgaagaagtggtcgctgccgaggacctcgacaaagtccgggaagaggtcgctcttgacgagctgcgagtgaagctcggcgacgccgttgacctgcagatgcaagaggaggtagagttgagcatgcgagaaggtcgtaaaggggtcagaaagccgttcgtgcgcaccttgtggctgccgatgacggctaggtgggccatccggaccatctttgggaagccctcctcgatcagactcatccggccgagccgagcgacgtcgcccgggaagagcttctcgaccgcctggaggaaatcgaggttgatcatgtagatgaggtccatgtgccgcggcaggaggttttggaggagcgggaccggccacttttcgagggcctgaaggacgagagggcaatcggtcagagatgctcaggagagctggaagcgagcggcaaccgctatgaacctcgggcaggacggtgtggtttgtgtacgagaacaccttagagacgatcttgaaggcccggtcaaaggacagaccctcgccgtcctcctcctcctcgtccatcaggatgcggagaagcctgggaagcgcgcaggaatgtcagccggggcagcccatgcggtcgaaaagcacgagaagacgtactcgacgatggcaagagtcggatgggtgctgtagagagtcgagtagggcatgaggatcagcctcttgggttgagctcaatgggcagcgaaggacgcactcgttgagctggatggcgacatagtcaggcagctcgtcccacgacttgtcgagcttcttgaagcgccggaggatgtcggcgagcgaagccgcgcaccagaggtactgctgtttgagccgaagctccttgccggcgtcgttcgagtcgttcgggtagaggacgcgagtgatggtctgggccgactgcgaggcctcgaccgaggcggcatacgagccggcgttgaacgaggccaggtcaaagccggtgatgggcttggccgcccagaggcgaatgttggctgtcgtcttagtgccgtggcctgcggagcgcgagacagactgtcagtcctccgccgctcacacggaggcacatgagcagacagactcacccgggatcggcatgtcgtaggcaacggcgaggacctcctggcctccgtgccagacgccgcggcccttggcgccgtcgaccttttcggccgagccgtagaagcggaccttgtaggtgacgtcgaggcgcgggatctcccatgggttctcgcgctcaagccacgggtcgggcgcctcgagctgggcgccgtcgggcgacagcagttgctggagggacaggagacgtcaactcgtggcctgcgaaaaacgtcggcaatcgaagggggcaccttgaagatgccatactcgtagcgcaggccgtagccccctttcgaagttggtagcggagcgtcagcagcagtaaggggtggcggttgtagtcgaagaaaacgcacaggcgggcactggaaacagtgaagcgtgtcagcattgcatgtcgattctgaacagacgctgcggcaggtaactcgcggtcgagtgtcgcaaacgagtcgacgtagcaggcagcaagccggcccagacctccattaccgagcccagcgtcgcgctcctcgtcgagcaggtcctcaaatgtgaagccaagcccgccgagcgcttccttgtactggtcgcgcatgccgaggttgaggacggcattgtcgagcgcgcggcccatgaggaactcgagcgagaggtactgccggtggcgaggcaaggcggcgagtcagaacgacgacgagatgagagagcaaggatagaggacgcacgtaggcgcgcttgggtgccttagccgtgtggtagctcgaggttgcgttgaaggaccggatgagctggtcgcggacggtgagcgactgagccgggcgtgtcgtacgcagcagcagcggcatcagcggcagcgaggaagtttgttgagtgagagcgattgcgtcagcaccttttacacgccggattcaagcctgcctggagagcttaccgtagcctgataagccggcgcctggtcgtccacgaggttgtacgcctgacgggcgagcgtcgtcgtgagctggtggacgatgcccttctggaggcctgcgaccgagacgtcggcgtcggtcttaagcgcggtccgccaggccttctcatcgccgagcggccaggccgaatcggccttgtcgtcaggaccctaagcgtgggcgaggcgaggcgggatgggagggcagggtcagtggctggcttggcgcgcgatcggcccaggggagatggcggcgtgagatggcggcgaaggcgcgtcgacatgagggcgcgactgacgatgtaagtcccttccaatcccaaagtgctcgccaaacgcgtcagcaagcaggatgagggcagagcaacccaactttagcaacaagcaacgcaccggtcaggctccgcttcatcgcgaccggccgcttgggtgccggcgccgacggggcatcaagctggccgacgtcgagcgtctcgccgacgatgctgcgccgccggctgagcgagggcgactttgtgccggacgccatctttggatgagaggggttgagtgaggagaggagaagctggctgaggtctgatggatcgggagatggatgtcggagagaagagagtacaggggagatgggaggctggctgacgccgggcggccggagggagcaagaaggttggcgaagcgacgggggctgatcccgctgcgcgacgacgcgcgggcggccgtcaacgacgtcggccctgggtccaatcctccgttcttcgagagagcaagcagtcgaaggacatgctggctggcgtgatggcctcttgcacgatctgccatcctgtcaaaaccgaaggggcagagggcggtcgctcgtgctcgtcggtcggcgatcgacggctcgcgttgacttcgtcgccaggacgacgtcgcccctcgccccgagacgcgcccgcggacaggtcgccgaaccgcttccggcagccgtcgtcctcgctcatccagtcgtccggccagctacgcaaccagcgctttcagctaccgctgttgctcagctcctgcgtctacgccggcccttgtcgaaggcgttcgaggctccggtcgcagcacgacccgtcgtcatcgcacctcctcgtacggtcggttgcgttcatggctcagcagcagccgtcgccctcggtcgcctttcgccagccctacctgccccgctcgagctcgatgacagccggcgaagaatacgagctcgcctcaccgcccgccgccggagggtcctcgcgcgagctcccacccttccagtcgtcagtcgacctctcggacgctgctggcgcgggccggtcgccgacgcagcagcagcaagggacgcgccggacacgaggcctctcgatccatcggctcgcccggcagccgacgtcgcttctttttgaacatttccactctcctgatgccgtccgccgagcactgccctcaaacttcctgcacgaggacgacgagccgaccagcagcggcggcgggggactgcacgacgcccgacggcccgacaatgcgatcctccatgggctcggcatggatgacgacccgtacgacgtcgctcgggacatgcagagcgcctggaagcgcaaagtcttcctgacgatggaggagccgacgagcagcgaggaggccctgatgatccactggggcgtgacggccctcatcgtgttctcgtgggcccccttcgttccagctagcaatccgctcaagcgactgatcccatcaccctttgcagcgcctttctgaccatcctctcgaccctccctggcgtgcacatgaacccgacctcaacgcgcatcatcttcgcactggacactaccgtcgtcttcctcttcagcgtcgagtacattatgcgcgtgcgtcttgtcgctggccagtggcaccggcctcagagacgctgaaccctcccctgctctctctcagatcattggccactcggattcatggccgcaattctacggctgggccttcagcttctttggcatcaccgacctcctctcgatcctcccttactacatcgagctgctgctgcaggccgacactgtacgtctcgcagtctgctcgcttataagaagctcgcccctgacgtcgacctggcctgcagtctgtcctctttcgcttttcgatcctgcggacgttccgcttgcttcgcgtcttccgcgccttccgctactcaaacacggtcatcctgtacgacccccgcgctctgctcggacaacgtgccagggctgattaacctttgaaccgccaaaccaggacgatcgaagtcatgcggatctcgatcaagctctcgcaggacgccctgatcgccctcggctacttcatcctcatggtcgtcgtcatcttttcgacgctcctctactttgccgagcgcggcgtctgggacccagtcctgcaggcatttgtcgacgccgacggggacccgaccgactttgcctcgatccccgcagcctcttggttcgtgttggtcacgatggccactgtagggtaatttttctctctctcattcatctccgtcctcctgagttctgactgaccttcgcttggccttctttacacagttatggcgacatcacgtgagacagcctgcgctgctctcatcagcgcaagctctatcactgaccctctcatcaaattctcacaggccgagatccacgctgggtcgcctctgcaccgttccgctgctggcattcggcctactcttgattgccctgccttcgttcgtcctcggtcgaaacttttcgctcgtctgggaccacctccgcagcgcctcgaccgtcgacggcaacagcagcatgctccacgaggcggccgactcgcggacgccccgtccgtcgatggacagtcggacgagcggcgacggcggcaacaatacgctcggcagccgcggggccagcggcaggatgtcgatggacacgacgccgctaccgacgacggccaacggctacgcctcggtcgccggcgggcagtcgaccggcctatcgacgctccccatgggctcgcccgagcagcgctcggcctcggctcactcggcctcgcgccggcgactgaatggccggctaggtctcgggccgacggcggtgagctcgcccgacctgagcaacctgaagctcgcgcgcaaccaggaggcgctgagcgcacagatcgacagcctgcgagaggttgtcgagagccaaggcaggttgattggccggctgctcgaggcgctcgaacagaggccacgagaaggagttgtctagcatgcgcgtcgactgggccggtcttccggttcgaggcatctaggataaacaggattcggcaaccggggcggtcggcaggcaagtagggctacagtgtggagagagagaacgagagggtgcaaagctacaggcagcgagagatggaggaaagagagagtcctgagagtggccggtcagacatactgatgcgcctgaagcagggaccagagctccttcaggctgacgggcttcgagatgaagcggtcgaagccttcgcagagggcgcgctgctggacttcggagctcgaagagccctgcgaggagcacatgagcgtcagctatcggcggatgcgcacacgcagcaagaggctcctcgacgcaccgtcaaggcaaagatgggcgcgcgaggataagccgggtcctgagccttgcgctcctcttcaaatgcgcgaatgagctcgacgctgccaaagccggacagaatcggcatcgacaggtccataaggacgactgggatcgaacaaaagcgagggatcagcagaggctttttcgacgctcgcgatcacgggacgcactggagtagtgacccggaggcgcacgcttgaacatctccgcgcctttcgctccgtcgacagcctcgtcgagcgggatgcccttcttcttgaagaaggcccggaggacgctacctggagtgaagagaatagggtgagcgattggttgaaaaaaggccctgacgttgaagcgcaaggaggccgacacacggttgacgcctgaaaggtcagagtgaaagactcggtcagcgaagcagttgctggtattggcggcagagctggtggacgcaccattgtcctcgacgtgaaggatgcgaggcaatgaggcggcaggcttctctgcctggacgtcaggagcagtagagggctgctcggttcctccgacgagcccgttggagagctcatggtccgtcggcgactgggagaccggagacggcgccgccgagtgcggatcgacgtcgacgcgcagtcgagcggcgccgctcgcgcgttcttcgtttgttcgatcgcggctgagaagctggctgatggcctcctcgagctggaccgggccgatcggcttgagcaacacgtcgacgaacgagtcggtcggggctagctgccggtcggccgaagcccagagcgcccgatggttcgggtaggtgaggaggatttcgaccggcgtcgactcgtcgacgatgaggagatcggtttccgactcgggtccgtcgccacgcagggtgacgtcccaagcaccgagcatgttttcgaggagccgacgctgggtctggagcgtcttgtctgtgagcgagtagccgatgaaagcgactgccagccggcctgcgaacgccggtggaggccgcggaggagccgacggcgtcgccattggaagagagagcgagacggtgaattcggaccctcggccctgaacagaggtgaccgagatggagccgccgaggctgcggacgaggttggacgtgatggctagaccgagaccggtaccgggcgtgatcgggtcttcctgggcgaagggctggaagcagaagcggcgaaggaaatcctcgctcatgcccttgccggtgtcaaggatcgaaagctcgacggcgatccggccgttccgcgccagggttagcgcagtcgagagtgaaaccttgacgtgcccgctgggcgtgtacttgaacctgagagcagaaagagcaacgaggcaggcgatcggcgtcaggatcaccgaccagcggagtgaaacgaggccaggaactcaacgcgttggagacgaggttgatgatgatgcgccggagggcgatggcgtcgacgagcacggcggccgaactgccctggaagtcgagcaggcactgaagcatcgcctgcggcggtccggatccgccgtcgaaggcggccgtcgtcgggtcaaagaactcgtcaagcgggccctgggtcgagcgccgagcgcgcgtaccgtactggtagctgacgaaggtctgactgacagactcttcgacaaaggcgcgcagctcgacctcggccgaatcgattggcttctggccgccttcgctgcgggcttggagcgactggccggtcgtcttggcaaaggctaggacgtgcgagatggtggaagagagcgaagacgagcacgcctggatggcccgcaggttagacccctgagcggcagtgagcttggtgtcgctcaagagtctgttgagggaaaggcgagcgtcagtgacggccggtgctaaaacacccgccagagggagcgcgagggcgtactctgcgctggcctgtgatgagatcgacgcgaggaggtcggtcagcaggcaggcggccagtcaagtggatttccagaggacgcacaaggatgccgtggagcggagtgcggagctcgtggctgatcaacggaagaaggaagggtcagctacgactcggcggcagtgaacgagacagcgggccgcacctcatgttgctgatgaactgggccttgatcttgtcgccctcctggacgcggcacatcagcagagccgagaggacgacgcccccaaccgcctgaaggaactggcactcgggctcgagaaattcttgcgcatgagaacatgtgtaggcgacgatgagggcgaccgccgacgagtcgggtgcgaggatcggagcgaggtagatgtaggcgacgttggacgggcacgggtagcctgtccagagcggcggctccgacgggccaaacattttgccctccgggtaggcagaaaggaagcgggcgaccgcagcgccgtcgagtgccggtgtcggctcaaagaagccgcccgtcgtcctcgggtccgggtgctctgcaacgagcgggtcgcgctcggccatagctagcacggcgagagagttaccctggccgggccgggcgctggctgtgggcgagaggacgacctcggtagagacgtagcggtagctcggagcggccggtgccaaggacgatgacgaggtcgacgggcttcctgcttggaccgccgcgggcgaccggccgagcttgaaagcccccagatcgaggatcgcgcatccctcaacgtcgagtgtgtcgcggatcgagcgggccgcccgatcgtagacgtcggagagctcagcgtcgacgacgtcgcgagtgagtgtccggagcgccgccgacgtctgattgatccgagcgaggtgcgagcgcgtcatccggaggtcgacctccttcattgcaagctcgccaaaggacagcagctgctcaatctcgccctcgtcaaacgacgcatgcggcttggtgtcgattaggcagagcgtgccgagggcaaagccgtccgagtcgcgcagctgcgtcccggcgtagaatcgtatcggcgtctcgccctggacgtaggggtgcgttgtgttgaagcgaaagtcggcgttggtatcgaggatgacgtgcggcttgtcgcgaaggatcgtgtgaccgcagatcgacgactcgcggtcatagatggtcgcctcaaagccgaccgaggccagcaccggcagccgctccttttccacgagcaggatcacacatgccgcgacgccaaacgaccgctgggccatccggctgattcgctggaaggccgagtcaaagtcgcccgtcgcagggttggcgtcgggcaggatcgcgtgccggtagagcgcccgacggcgagcgtcttcgctcggaggcagcggcggcggcagccagccgtcgtccgaccaccgcttgaactcgggacctcctctggcgggtcgcgagaggcttggccgactgttgctcggcgagagagggctggcagcgctcgacttggtctgcgctgccgtcgagcgctggccgaatggcggttctttcgagatcggatcccactcgccagcggcgtagcgattgagccagctgagtaaaacgagtgatatgaggtcagccgaccaaagagacgacaacacaggagacgtctggcgctcggcctaggcacgcggtgaagtcgctgagcagggccgtcgagtgcgtgctgatgccacgaatcgtctggccctcgagcgcgctcgcgcgccggttcaaacttgccggcggctgatgcgaggcctgctggtgagggtcgaccgggagttcggacaacgagtacgacggtgcgagcggtcgagcggcgtccgccgccgaggcaaactcaaacatggacaggcagctgtccatgcctggcgatttcggaggccgaggcgtctgccttcaggaggtggaccaatctgccgtcgtctctaccggcgcccgagaaagaggaagacgaggaagtgatgccggccggccgagcgtcggtagcgagtaggggaagcgatttgctgactgttgcccgagggagggggccaagagaggctcggatgtttcccgtcgagttacggagcgctcgccgtcgacaaaagaacccaggagcaagacgatagcctatgcgagacaggtggctgtacgaggcgggcaagagaaggataatgggcgaacagggacggcgagcgccggttctgcttgcttgcttcctgctgctgctcctgctggctgctgcaccgccgctcgcgcgccgccgcccccgcgcggtctctttcggccgcggctcccgtggacggatctccgtcaaccggtacgaaccgacgacgatcggcacaaagactcatgacatgcgacgggcgacgtcctgcacgaggaggaagaagcggcaaagcaggtagcgggagcgcttgctcgcgccagtcattcagcgcggaccaccccaaccgctcgagggccggtcgtacgagtaggaaaatgcgaccgagccgaccgacggcggaggcggcggcggcgacgacgacgatgatgacgtcgagctgctgtcatcgaagccagtgcttgcttcgttctcgcgaggcatgctcgtctgagggactggcgggaggcgagcgaagggagccgccggccggtcagcgtctggcagcagaggtgaaagagctcagccggagacgtacgcggcatgcttgggggcatcgagccctgctggtagaacggttggtactgttgctgctgctgcatgccgccgccgccgtaagagctagccgagtacatgccctgcatgcccatctacgccagacacgggccgagcgctcagtcagcgtacgctcggtcgcccaaagctcaacagggacgcaccatgccggcttgaggcgagaccatgcccatgccgaacgcagtaggctgaaagaaggcccccatgggcatcatcggcaggccgtacgagccgccaggaaagggcatcatgccgcccatcgccatcccggctgggtaagcatcgacaccggtgccgccgtggttgccgactgcatgcccgagctgttgctgctgctgctgttgcggcggaggttgccgctgctgctgctgctgctgctgccgcggctgggtttgcagcgacattccgttgcttgtgcccatcggccgtggaggcagtggcagcgaggcaaagcccggaacgctgctcaccgcgatcgggacgtagggccggtggcccgaggaaggggcgccactgccaccgctactgaactgcgatgagtggggccgagaagggccgccagagccgttgcgaacgggcgacttgggccggaggttctcgacctctgtagagaaggggggagcaccacttcagcatctgcgctggcaaaggctccgcgagggagacggccaggcgcaccttctggcgttgggtagagataccggccgtcgatccggacgagcgcttcatacgcatccttatcaaagaggcggatgccgtctgcgagcggtctcacctcgggctcgataaggccgctcgtctccgcggcgctagcgagtgactcgagccgttcgacgaggcttggtccgccagcctggctgtcagagctgagcgacggtgcctgagcctccgatgcgggctcttcccagccggccgtcacccagccctgtcgaggacgtctctgggagccaaagaggtcgagccgccgagtacccatcgaaaagttttcggcgagcgaaaggagctccggcggctttgcatgcgggtctgttcagtaagcaagaaggaatcgttcgggtgagcctggcttcgggtttcgcagagtcgtcttaggccagctgcacaccttgcgggtcgcctgcccagacgatgatgtcggtgtcgatctggcggaaagagaagggcggtcgagttcagcctggctgccgaatgctggcgaccggccaaaaggacgccctccggcggacgcacattggtgtgcacgagccggccatcgaccgaacggcggaccgtgccgcggatgcccatcaagcagtgctccttggtgttggcaaagatggagccggtcgaatcggccatctgcgcagcagcagcagcagcagaaggggggtggcggcgggcgaaaaggcgtcaggtcttgtcaagtccggtcctgcaaggtcgccggcggcaagaaggagacgcacgctggagccttttgcggaagccctgccggtcttgacccagacgatctcttcgcagcggcggaacccccagcgggcgagcgtctcgcggcccttttcgaggccgtcggcgccgccctctccgacccagaggtagacgaacgacgggtcggctgtcaactgccggattggcagcgtagcaatctcggcccagccgaggccggctggcggtgtgacgacgaccgtgtcaaaatgggtctggccgagggtcgccagcaggtgcgcgttgaaaggcaggaccgcgggcgaggtctctgacaacggcactggtcgagaggccggcagcgctgccagcggcgtcgtcctcgacattttttccggttcagtgatcgaggctggtactggccgacactcgtccgccgacaccgctggtccgaggggtgcgagtggcaggaagagcggcgggtgcgcgagccgggcaaagagctcctttttgagccggagcagtcgctttgacctgccgatggatcagatgaggacgagcaggagtcgagtcagtaagaagactgcctgctcgcctggccggcctaggctaccgagcgagcgcctggccaggggacctgcgaccgtcaacgcacctcgggtactcgtcgaaccgccgagcctcgtcggcgccggcgatgaagctccctccccattcgcccgtctggccatagcgcgctggcaggtcgttccggaccgtctcttcgtcccagcggtagcacggatagagcacctcgaccttggcccgcttagctggagggatggccgtcaggtcgacgtcgtcggcagcagccggccctcggccctcggcgccctcgaccgcaagggtcggcactcggcgatccgaaggcgagacgacggtcgacctgcgttgacgccgcgaggcgactcgaacgagaagagcacggtgatgggcgagcgtgcctcggctgctgctgctgctcgagctagcggcgacagtcatggccgatggaggtgggcgtcggaggggccggagcgagtgtcgcgcagcagcacgagaagacgaggaacagccagcattgacgggggtcggtagccagcaggaggagtgctcgcaaacagccacaaaagtcgcacacggagccatgcaatcagaggattaatcaagagagaaaattacgaggcagagggagaaggtcgtcatagagaggcgcgaggcagcaagggcgaaggcctggggggcttgtctagccgacgagcgaagagtggctgatgacatcggccgcagccaggacgtcgacgtcggccgcgtgctggaggaggagagggctggagccgcagtcggcggcggcggcagcggtggggaacgcgctcggaaggagtaggagggaggaggcagagcgggacgagaggggagctgggcaggtagatgccagggccccgagctggccgaccaagctgatcaaccggcgcaggtcttctgacgctttgagaggccgagacgcctcacccgcaatggcaacggcaacggcaaaaagaaacaagcctgcgaagactggagactacacgaattgaacgcgtgaccttatacatgctaagcatacgctctaccaactgagctaaatcccctacacaggttgttgcttgtcgtttggcaatgtgcaaggtgtatcctactgtacatgcagagaaggagagaaggagagggggagtggaggacagggaagagaggggggggggcagagagagggtgaaagggcggagaaaggcaggcaggcaagaggcccctgatcgaccaaacaagatgggctgagcacgctatagagtgggttaagaggagccggacacacgccgcgtacgtccagacgcccgcgcgccaaccgtctcatctcgattcttgccctttggcccccacgctcgctcctcgatcgtcctagcaaccaattttggcaagggcagatcaaagacgtgcacctgcacaccctgtcaccgacgcaggacgcaaaaatggtccatgtgctccgcatgctattgactgtcgaccagaggctccgagccgttcgaaacccgattctctgcccatgggttacccttcccgatgggggcctcagccgcgacgccggcgagatccttgccgtcagccgtccaccactgcgacgactcgaagcttggagccgggactgtgcgggagtcggcagtcaggcatcagcttgcgtcagttgcacgggctgacgcacgagagtcgtcgccgtcatcgatcccaacctggccgcggcgcccagcgatgtcgttaggaaaggtctccgaggctgtcgcgcggagctcctccttgactctgcgacggacagatggcactgcgtcaagtcgctaatccggtcaggtccgcagatatcaacgcactctttggagacggccgagcgtcgggccttgtcgataacctgagcgttggcctgaaagcgaccaaagactgggcgatggtccgaggtgcgcagctctgcgcgatcgtacgactgcaggtcgacctgtgaagtggctaacgtcagcttggcggttgctggcgagagcctcaacgatggcgactgacatcggagccgcggtagacgacacggtcggtgtaggccgggatgcgggccttctcagaagtgtcgtagtcgtccgtgccattgtcgtacttgtacgtcgggctgcagcacatcgaaagttcagaggcagcatcggggagacgatcgcgacagctcgagacgcacaggaagcagatgtcgccctcgctgtagccaccgaaggctgcaccctcgcgcatgacgcgctgaagctggtcggcttcgagaagcctcgggacgtcgccctgggcagcaagcgcacgcgcctcgtcgttggccaggtcgatccggtagttgaagtcgccggcgaagaggacgacactggcggcgatcgagcgggtgaactgtttactcagctgcaaacatgccaggcgacgagtcaaacgcactcatgactccgcagcgccttgccgcgcaggaagcgtaagccggcctcaatcgtgtgaaagtcggagttgcgctcctggacatttgagtggccggccgcgaggtgctgcgttgcgttgaatacagtaggggtaagtgggacgtacccggataccggtccgctcaagaaaaagtacgcactgccgtcacaaagcagattgacgtgtcaaagaggtcgaggcggatggcgacgccgcccttgttgccgctcatgccgcgcaggccggtctttttcgtcgtcgactcgaccttgcggacgtcaccggccagtgcatccttgatgaagacgattagggccgtgccgacgagctgtaggcgcgactcgtgcgtcagtcttggacgccgtgaatggaacggaagagacgtacctgctcgctccgcaggagcaggtattcgaacttcttccccggccgagccgctagcgtctcggtgatgaccttttcccagagccgcctgaaagagacaatgcatacgtcagcctggagatgaaacagagcgtctctatcaaaattgagcgcacagcttggcagggtcggtctggacgatctgctgcgcgttgagagggacaatttcttggaaggcgaccgatatcaggtccgtactgtcgcgagccgtcagcagacaagcaacagcaggaacagtttggatagtcgctcactcggtcaagtcggctgcgaagggcgaaggtccgagtgagcaatcacgcgaccaggtagaggcgaggctctgcatccactcacaagtcgacggcagtagccagggcaggaggttctccgacggcgacttgccgttcaggttccatgtacaggcgttggcggtaaacttgcggtaggaccggaactctgacgacctgcgtccgtcggttgccacaggtcagtcttttctctggcgtttgcaggacgcgcttgacgcgcacctctcctccatcatctcgcgatgcttctcctgaagcggatcgtggatcaaaatcagccgctggtcggcccgcatgccctgtaggtgagaatcgtcgcgagggcagcattagtggagctccgacggtcgaaggcagctgcaatacgctggacgcaccagcaacatgtcgatcgagacctgcttcgagccgtccgtgaagttgttgatgtaggcgctgcggaggcgagcggcacggctgatgagttcgagcagcagaaggagagagacagcaggctaatcgcgaacgcaccgaccgacgctcttgctcgcgtcgctcagtagcccgccgagcgtccgcttgcccgtgcgtgtgaagctggtgttgatcgctcccgtgccggcgtaaacccttgtccgggtcgtcggggtcagtcttagcttgcgtctggcctgtaggatgcgagaactcacttggagaggaggtcgccattgtcggcccaaaggttggagtgcgtggtccagagctgcgggagattgacccatgtcgggttgacggacgagacgaaccgctcgacgactgcggcggataggatctcgcaaacgacgttcgttcgatcgaggctaaatggcgagtcggcaagcagtcagctaacgagcagtcgggcgcaggaagcgatggctagtcgcaccagtcgaggcagttggtgcggaagacgccgcgctgctcctcaaggacgtgcgcctcgccggacgctgccgcatcgatgagtgtccagccaaagccctcgattgcgtcacgtacagcaggcaaggagcggatgccgcttcggacgctctctgccccgcccactcggacggctccgtgaaagtcaaagtttgtcatggcgacgagtggcggcagaggctttgaccggccgtacgccttgaggtgatcgttgtagctcgtcgagaggaccacctcctggtctttgataccgagcaagctgagaaggcaagagacgtcagtcctgaaagcgaattttggctggtcgacagaacaggagggcggacacacttgaggttgtggacgcgctggtagatgtcaacgagctcgtcaaagtgcttctcgaacgcgagctgtgagacctgaggcggccgcgtgatctggagcttctggccaaacgcctgcatgccttgctgctcccagaacactgcgaagcggggatcgtctctttgtcagctgaccgaggcttccggtcgcgaccaagctggactcacacggtacgctaccccggacctgcgtccaagacatgctgatgtcgcctatggaaatgatcgtctcagtctgatggatggcccgaagttagtcgcaatgcagtcagccgcaaagcgtagaggaacgacggacctcgacaaagttagccgtgttgccgtcttcgtcgacgccccggctgttgaagcgagtgccggctcgtcggctgctgagccgcgacacaagcgccagcgtcagattctccgatacgtaaggtagcgggatcgtcgaagtcgatacaaagccttggatcaggggcagctgcaatcgtcgtcgcctcggcgtcagcgaaccgaccctcgcttttgtcagtttctcggctcggacgtacgatgacgccccaggcatcgagatcggcacgctcgtcgtcctcgagttcggccgcaaagtcacgcaggccgctgagcaggtactggttccagacgaagcgccggtcctcgtcgcatgcttgctcgcccgtctcctcgagactaaccccggcatcgcccttgctaccccgccgcaggcgctcctccacccgcgagctcaggtcccagcttccgccatcggcaaagaagaaggagccggcctcgagaatcttcttcatgccggcgagtgggtgcgggaagagtggctgctgagtcggcgcctcgtactgcgacgtgcgcaacggcgcagagtctccgtgtacgtcgtccgatccaatcaaggcgggatcggcgtcccatgtcgaggaggtcaacgagtgatacgagacagtcaggagcctcgatacgggctcggccagcgacgtgctgcggacgggacgcgtcgttgtcagcccccccccgcttcaacacgaggatcttgtcaagaggtccaggcacgcacttggtcgctgggcggacattgcccacctttcgcgttccgcatgccagcacgaggaacgtctcgcggacggggctgccgccagcgtcgtgagagccgccgccctcgacgaggccgagcacgccggcaacgtgtccttgccagcgtctgaagtcgccagagtcgaggccgaggtctgacgtcggcacgtactcgacgacgacgacattcgacgcctgggaaggctgctgccggaagacgaggctcttggatgaggctgtgggtgaagctggtgcgaggacgagcgttcttggcgacgaccgcttgacgtctgcggacgagatgaaagacgcagcctccgtcagcttgagctgagctcgaacgtagcgagcttgtccagctctccaggacgcacagagttggagagggctgttcatgctcgaccctcgactaactggctgcagagagtggaggaggctcgaccgcaagtcgcactgattgaaggctggcgaggttggcccgggtgtcgggcgagctaggctgggtcggtgtgaaccggatgctgcgaacaacagatcagacaggaactcgaggttcagggttcgtgggagctctgtctttgcacgtgacaggcgtctgccgggtctgctggtcgatggggcaggctggaggaggtaggcagacaggcggcggcggcggcggcggcggcggcggcggcggcctgcgcagcgcgaagcgtcgccggtgcgcagcaagacgacgtcctgcaaccgctctctttgccctgcttgcctgcctgcctgctaccctgattcttgctttgccttactcattcaccactgcctgtccttccgcttgctctccgaccggtctccctctcgtccctgtcctccactccccctctccctctctccttctctgcatgtacggtaggatacacctcgcacattgccaaacgacaagcaacaacctgtgtaggggatttagctcagttggtagagcgtatgcttagcatgtataaggtcacgcgttcaattcgtgtagtctccattcttcgcaggcttgtcattctttttgccgccggtgcgggcaagtgtcgtgcaggcggacgctctgctaggatcactgctaatcattcaccgaagctacagtttctctcgacacacctggaggcgaggcagtcactaatgcagctggcgtgagacgagcagacgcgtcggctgccgacgcgaaagggcaacgacgcgccgggaaagaaagcacttggaaagctcggcgacgcgctccgacgccgaccacagcagacgacccgcccttgacgagtgacctcccctccttgctttcctctgcgcaacctccctatcgacacttcagccagctgccactactgcacaccaaccctcctctgggccgccagccagccatgccgtctccgaacggccgcacgacgatcctcgccccaaccttcggccctccccccggcagcaagggtccgcaagaccagaacgcaccgccgcccgtccaggaccagaatgcggttccagggagcagcacagctctccataggccgccacgagttctcagcgtgacgatgaacggcaccgagcaggacggcgacgcttcgcgctggcccggacgcactcagggcgccgaagaggctgccagctcggaggagagcgaccaggaagccgatgacgacgacaacgacgaggagtcggagattgaccgtacaccgctccatagtgcgtctcgaaggtctctggagcgagtgagccagctgaagtcctccctgctctcgccatccgtgcccggttactcgcagtcgaggttcggctcgcgccctactcgacactccggcacgaccacgtccggcacatcgtcgagacgttcatccacgagaacttcagcaagattgccgtcggcggcgtcgagattgacggctggcgcgaggtccgcatcctcgaggagaattgcgagagcatcgtcgcagctgagacgcgttcgttcggccacctcgttggcgtgcaagtcgagcgcgcagctgacgcattcagcctcaccttgtccttgcctctttcggcccatccagcgcttgacatgccctatccaccgctgcagatgctgctgctccagacgcacgtctaccagccatcaagggtcacctcgctcgaagagtttaccgctaacctggacgaggacgaggacgagaacggcatcacggccgccagtgtgcgcgagctgccgagcaaggagctgcagggcctctgggacacgtgagctcggccagtgattctggctgcgtggcaatgatccagggctgacgctgcaccctcgttgcccatcaggctcatttacggcgacgacgtcaagaacaagctgctcaactacatctacacgacacttctcttctccgacgccaacgtcgacttcaacatcgtcacctggaacaggtcagtctagcaggattggcgcatacaaggctccggtgagtcgttccagcgacaagctgccgctgacgccctccttcgcgcttgtagagtcgtcctcctccatggcccgccagggacaggcaagacgtcgctgtgtcgagcactggcgcagaagcttgcgattaggctctcgagtcggtgcgtggcccgcagactctcgtcctttagttgctcattcctgacgctcgtacccgccgggcgctctcccgcagatatcctcacggcaagctgatcgagatcaactcgcactcgctcttctcaaaatggttttctgagtcaggcaagctcgtgcagaagctctttgcgaccgtgacggagatggtcgaggacgagtcgggtttcgttgttgtgctcataggtgcgtgacccgtgacccaataggtttgagatctcgacctggtgctgacttgggtcgctggttcatctctcagacgaggtcgagagtttgacggcagcccgggcgggcgcagcgagcgggactgagccctccgatgcccttcgggtgcgtcgcttgccgtctcagtcgagcctcgatttgctgctgactgacacggattgaccaatcgcacaggtcgtgaatgctctgctgacccagcttgacaagctgaagaaccgcaagaacgtcttaatcatgacgacgtccaacatcgctcagtcgatcggtacgtctccgccgcaagcagtgtcacgttgacctggggctgactcttgactcccggcgcagactcggccttcgtcgaccgggccgacatcaaacagtacatcggcgtcccacctcagcaggccatctactggatcctgtgcggctgcctgactgagctcatgcggagcaggattgtggaagacatggtccgtcctccgggtgctcagctcaggaccggccagggctgacctgggtgatgttcatcgcagaatcttttggattggaggacggccgagctcttccataatactggcgcgtccgcgtcgaaaaaagacaatgcgaagcgtctgagcctcaagctctacaccctcgccggtcgttgtgctgtgcgtcttctgactgcggagctggtcgcagccgaccttcctctctgaccttgccgctttcgacgctcagggtatgtcgggccggacgctgcgccgtctccccgtcctcgcccacgcgcgccacatctcgctgtcagccctgccagatgtcggtggcaaggcaactcggctcgagacctggattggcgcgatggagaaggttgtcgacgaagagcgcatcgcgatgcagagtgtcaaggatggaggcacgacagatctatgagggtcccagacggatgacgcgcaagcttggagcgggcgaaagttgtcatgggagagcacagggacgagagcgattggagtcagacggcgacctttctgaggaagcccttcattttgctgatagcgccggtcgacggcttggaaggcttgttgggcggccgctcgctcttccatgagctgctccgcggcttctcggcgcgcgaagctggctggaggtcgtcggtcggtgtgattggcgaggccgggagggtgacgatgctgccggtcggagaggttggcgcaaaggtcgaggaaaggaagtcggtcttgccgtgctcctggagggctcgaaggtcgagagacgcaagcagcggcggggtgaccgaccgtcggccggcgtcgatggcaagagcctccgctagacgctgcttctcttcgagtgcggaaccgggggccgcggccgaggggcggaggctgccgtccttcttgagattgaagaccgagacgagcttctcgggcgcctcgccaatccatgcgttgaggtcgccgtcgtctgctgcataggccgtctcgagaatgatctcttcgacggaccagccggagtcagcggcccgcagaccgcgaccgcgcttgaggtcggacgtcctccgcaagtgcgaagtgaactgctgcggccagttgggaagcggctgtccgcccttgcctacctcagagagcagccacgcccactcttgctgtgaatgaaagccgctggagcgtcagccttgcctgagagtgggcgcatagatgagacaactcacctcctcctccaggtcgagccagacatgcccgtcctcagagacatgctcgatgttgcgaccgctgccgacatgtcgggcggccgactcgccacgccatgcaacgtccttcgagcctggctggcgcgtcttcttgggcttggccggctgcaagggagatgtcagctctcgagcgagccagattcgatgtggacagcaatggcacgcacgaggttaccgaggaattcctcgatttcgaccttcttggcataaggtagcggccgcgcctgctcggccatcttgcgccgctccttctcgcgtttggcctggtccttctcgcgcgccgtcggcggtcgcttagacgggttgccctggccagacttacggccggcgtccgtggttggcggaacggcgacagtgcgcagcggtgcagcctgccgcatcggcgacgtgcacgaccgtcggcgagcgcctgcgagcggcgtccgaggcggcgagtactggtaccggtcgagggagagggacgacgtcgagcagagacgcgacgtccgcattcggccgtaagggccagacggtgcccctggaccgaaggagacggtcgtcggcgagacgcctggcgaagtcggcggcgagggctgcagctggaagccaattgggagcgtctcaaacgcgccgagcgagagcgcccagtcggaccggccagagtgggcgctcgacgtcgacggcgagcgttggagccgaagctcgagcagacgggcggcagacggcgtcgcgtttagaatgaagatctcggtcggcggcgccttccgcggatgaggccggcgggctgcgtccggtgtggcggtcaggttgaaggtggccgccgagtgggctgcgacgagcggctgtcgcaaggacgactgacgcttaggctgatcaccggcgccgaggaaggtcgttgagcttggcgacaggccgggcgtcggcaaatatgacgacgacgtcgcgaaggccgaagctgagggcgaggtcatctcggagtcaaagtcggtcgaccgcggtgagggtgcaaaggatgaccgccgggctgagaggggcgtgtaggaagaccgacgcgagcgcggctgagagtggaacttggggttggaggcaggccgtcgacggcgtcggaccttgttcgctggggaggtcgccgtcgggtcgtcggtctgcagcggcggctgtgatgcggccctgcgattggcgagctgctggcgagctcgaaaggactgggtgttgccgaggacggccgagggagtaaacggctggctgaggaagaacgggctgtcggccccgggcgtgagggcttgagtcggcgagaggtcggcgaatgagtcgagcagggcttgcgtgcgagcggaggtgagcgaggtcgagctgccggctcctagtagcgaggccgtcgtcgtcgtctttgagggcgggtcaatgggagcggtcgccatcttgcccgaggtcgtgctgtcgggtcttggtttggtttggggctcagctctgcgggagagcgagcgtggtgagtcggtgcgggcgtggggcgagatgaacgggtgcttgagctcgttgcaggcaaggatcgaggcaaagaaggtcgtcgtctgctggccgccgcaacgtgcaggaaggttcgtcagcccagctctcgcatcagtttgcggccatcaaggggagccgcttagcgagcaggtcgaccagcagagcgatcaaagggcaaggcggtcggggtcaggcgaacaaaaggcgaggcagagagacaaggcgcacaccggcgccgaaatctgaaacgcgccttgttcttctcgcttgcccctaaaagttgtctttcgcgactcacgcgaggtgggggagccggccggaagccgcagcccgacaatgaccgacctggggcaagaccggtctcggttcgagagcaagagggccgcattcgagagccgatgtccccctccaaagggcgggcgggtctgcaaacgggggcaaacggtaggacgagcaagaggagacgcagggtgcggtgcaggtgcgaaaaagcaaggtggggaagaggtgtttgacgaggccacaagggcaaggttcgctcttcgccgacgataatgaaaaggggagagcgatacagtggtagaaggaggaggcttgcgatcggcctgcgagatggagggccgcccaagacgagcgtctgaggtcccctgcgcgcgagggtgagccagagagggggcgagcagcatggtgcctgttgagagagacagtgcgtcagcttccagcgacgcttgtgtctgaccgcatgactcacctggacgaggtcaaaagtagttgccgagagggttcccaaacgtgtcgggcgtgcctgtgcctgccaagagtgctagactgtcagcgacgttagaagaaagcgagagtcgctcgtcgcgcaccattcgttgtcgggttgcgccgtctggtgcttggggcgtcctccattggaggcgtcaacggcgccggcgccgactcgtcgtaagccgccccggtcgcaatgctgaggcggtcaatggcccttgatctgggtctgcggtggatgtcctcgctcgcgtcgtcgttgtcgtactggccatcctgttcgccctcgtcgtaatactggccgagcgagtagacgctctgcccgtggccgagattctggatgtaggcaggcgacggcgggccgctcgccaggtcgtccgagtagaccgagcgcgagtcgcggtcgcctggacctcgcgagctcggcacagccaggccgctgcccaacttagccatcggaattgcgttgcctataggcgcgacgctctcttctgcaccaaagtcgccaatctccgccgccgacgacttgggccgcgagtcaagggcgcccgagtcggcattgcgcagctttgctgacacctgcgtcgccccaaatgagacgatgctcggccgattggcgttcgatgccgcgctcatctcgggcggctcgagcgggcgctcgtatgcaggctgcggcaagccgcgcgccagaggcccgacagagccctgaccgtcagggacgtcgactttggtgccggccttcgtcgacgaacggcggagcgacttctgctgggcagcccagatcggggtggccgtcgcagccgaggttgcagggccgtcgtcgtctagctgacggaatgcccgagatcggctgccagaggtcgcaacggacgaccggaaaggcgccgggttgccgatgaaagacgaaggcgcgccaaagatgctgcgccggccgccagcagatgtcggaccgggaggcgaggacgagaggccgttgacatcgggcgtccggcggcgtcgacatttaaagatggtcaagacgatgaggcctgagatagaggattgtatcagcttggtctgaacccgaaaggggcctgccacagacagggggatggacgtaccgagaagcgcgacgccgccaacggcggccgcaacgtaaatgccgagggacgcgctggcagagattgcgccgtcgttcgaggaggaagcagagggctccggccgggcagatgacgttagcgaggcaggagccagaatgagcgaggaggaggaaatgggagtggagggcgcagcgttgtccctgaaagagccatcagagtcaagcatcagccgctaggtgcaagctaggggaaaagaaatggttgcgcaccgcgtttggacgctggcgaagcggaaggagtcaacgagcaggacgccgtcgccgccttcgccaacattgcgcatctcgaagcgatgagggccgttcgcaagcccgcttgcggaccagagcagctggccgccagtgatgccatcgccggcgtcgacgttagcgctggccgcgacgacgccgaggctcacgccgtcgaccgacggctcaaacgcgccgaccatagggctgagcggggcgtagactgcaagatctgtgccggtaaagttgaagccgagcgtcgcgtcgacgactgacgtccaggcgagcgagttgttgacggccgaagatagaaggggcgcgagaagggcggcctgcgtctcgttgaggatgtcggccgacggattcgaggttgacatgagcgaccagcctgcagacaaagcgatctcgcccgtctgccaagcaccgtcgtccagcgtcgaggtctcgacagtggagctgcatatgtaggcagcgcagtcagaatctggattctcgctggcgactgatgcccgcggaggacgaacccttcacgatggacctcgataccagtgatgcgagcgacgccctcctggctcggctgacgggccgtgtcgcgcgactggaattcgattaggaggctgtgagtcccaaacggcaggccggtcaggttggcggacgtcgttgtcgccaggtcggccacggccgagtagacggtgccgttgcacgagagtgtaaggttgtagctcgacgtcggttcgacgaggacactcaggccagtgcctgaagttggggaaacgcgaagacgttgccggatcagcacagtcggcaaatgatatgagctaagtagaggagcagaggcaggagtaggggcaagaggaaggccgcaccttgaagctctgccttaaccgtcagcgggctagtgacagcccagccctcggcataccgttggctcaggcccgaccaggcgccctcgttggcccatccctgctgccagccgccaccggcccagccgcacgaagggccgttgatgcacgggctaaaggcgaggagaggcgagagcgtcgagacgaacgtcgtcagggtcgccggcggcatgtcggtcggggagctggttgcaagcgcgatgctcgattgaccgactggtagtcgaggttagggggctggatagagtgatgagggagcaatggaggcttgcgagattgctgagaaggtcaacgcagggccaagaaggcaataggaggccgtcgagtccagctgcgaaaggggggggggcggtgaccgacgtcggcgagcacgagagagcgagctgatcaacagctgccggaggagagtgcggagaggaaaggagtgtcgtcggcagctggggccgttgagctcgctcggaggttcgagctttcgtgcgagggcgggtgagggtcgacgggaaaggtggaaggaaggcagctcgcatcccttctgccggctgagctgctgcgcgcaccgaagtaagagaacaggcgcgtgcgctccttgcggccttgcgtccgagagcgctgctgcacctgacgtcgtgctcatctttctagcaggcaggcatccttgcaaatgagcgagtagcatctggcatgtcatcaggtacaacagcgctgctcaaccttccggcagtagcagctcgcgcggatctcaacatcggcgacagcaagggcgaccttcaggtcgacttcgatgacatcggcgagcgccgtttggccgagcttgcggaggcactcgtggtagccgtgcagggcccagacgttgcgcgggtgccggtgtgcgcgcgggatcttcgagtcgaagccgaggtcggccgcatagacggccgcagcgtcctcgacctggccctgctcgagcaagagggcggcgagcgcgtgccgaggaggttgcatccagccccaaggctcggcgtagacgaggttgtcggatcggtggacggcctcgcggaggtgggtaaaggcggcctcgtggtcgcctttgcggtactcgagctcgcccgcgagcatcgactcaccaacggcgaggatcgcatgcgccgagttggggtacgccgcacgagtcgccggcacggccgcacacgccgcgcgaaagagccgctgctcctcctctgcctcggcaacccggcccaagacggcgtgagcgacgccgcggccgtagcggagcgtcgccgtggtcacggcgtagagcgcccggtcgcttgggatcggcacggcgaggagctcgtcccagaggccgaagcggacgaggacatggacccggtcggcccgaaaggtctcgaaccagtcggcattgtcgccaatccgaaggacgcgctcagagagaacgcgttcgatctcgtcgacgccgtgccgggcgacctcgagctggccgttgaacagcgccgcgtagacgagaaactccatgttgtggatgcgatagaccgtgtaaaagtctgagtcagaggtgagccgctcgtactcgcggtcggcgaccatcgccttggcatttgaatcgatcgcccgccgatagtcgccaatgacgacgtcaatgtgcgaaggcatgtggcgcaagtggcccgaggagggaacgaggtcgcggagccggtcgccggcgacgatggcaacctctggtgtcggcgagagttccatcagatggatccagaggtgcaggacgccaggatgagtgtgactgcgcgggtcagcaagcgccttggccaggacgtcgcggatctcgagcgtgtgcgcgtcggcgtttggctcgccggtcggaatgtcccagagctgccagggcgcgaggttcatgcgcgagtcggcgtagacggtcgcgacgtcgaggtcgtccggataccgggcgtagacgtcgcgcatggcgtcgccccagagccgagtgcagcgcttgagctcggccgcgtctggcgtcggctccgtcgggtagcggaggatgagcgcttcggcgagcgcccgctcgaccgggtcggtcgcatgctcgatggcgagctcggccgcccggatgcaggttgcgaggaggccgggcagctccacctttgcccggagctggaacggtcgattataatgggccccgtttgcgtacgagacgccccagtacgccatcgcacaggtcgggtcgtggagcagcgcctgctggaagcaacggacggcttcttcgtgattgaagccccatgtcgtctggatgcctcggtcgacccaggtctgagcggccgggacgcttgtctgaaccggccgcgtacccgtgcctgagccgagctcgtacggataggccgcgacgtccgaggcctcgaggtcggcgggtacgacaagcgggtcgagcggcatgctggcagcttgtgtctgagggtggagtatgagcttggtgagcgttcaaaagggcttacagggtcggagaggaacctaggcgaaggcgccggcatcgccggagacggccgcgagtgagttacgctctttgattacgcccgactgcacgccgccccgtgatcagcgcgcggctcccccgccttgcccctcgaccacctagaccccgacttccgaccgtcgaccgtccaaccccttcctctcgcctactcatcctcgctagcatgctgccctcgtcgtcgtttgcggcggctgtcgtggcgattctcgcagccctgccggcagccgacgccttctacctaccaggtccgtcgcgcctccttccgggttaaacgctgccgctcgccctcgcccgccttgatcttgctctgacctcaacctggcgcccttcttgacaggtactgtgcgtagcaagagagcaaacagagacgtggccagaagttctgactgatgacagaacgcttcttcttttggcaggccccaaaagactacaagtcgggcgagcaaggtacgcatcacccgccgcagcccgcagccggcggcagctcgatcttgagctccgctagagggtgactctggacctgaccgtgtgctcctcgcgagcctcttacagtcctcgtctctacgaatgcgatcgcaccaatgctctcgacaaaactcgtgcgtccgccgctgggctgatgccgcccgcatccgacgcgactgggaggctgacgggcttgcgcctgacccgtttggacgcgccccgccgacagatgtcgatgatctcctgttcgtcaagtcgattccctctggccctcgcagatctacttgctgaccctatcttcgggcctgtcagacgactattatgacgagaagctccacatgtgcgcgcccgaaggcggcgcgcagaagcagcccgagagcctcggctcgatcctctttggcgaccgcgtcttcagcacgcccttcgacgtgcgactcggtccattgtcactttgagggcaagagagtctgaggctgacgattgacccgccaacagattcaaatgctgcaaaacgtctcctgccagactctgtgtctgtcaaccgtccccaaggacgacgctgccttcatcaaccatctcatcaaagaggactacggctacaactttctcgtcgacggcctgccggcggccgaggtcaagcgcgaggagcgcacgggcgacaagttttacgacgttggcggggtcaacctcggcgacgacacgaccaatccagaggtccctgcgctcaacaaccattttgacatcctcctcgagtgcgtccctctgaccgacaagaggcgtctcgagccagcgcctgatccgctccatggtccacagataccacacgcgcgacaatgtcaaccaccggatcgtcggcgtcctcgtctacccgcgctcgtaagtcacccccttgactgacgcttggcttgcaggaaagctgacgtcttcctccgcatcgcctcctcctctaggaccgcctcgctcgtcgagggaaggactgagcccaactgtcaggccccgacggcccaaattctgagcgagacgtccgacaaccagagtgcgtcctaattgcatgcccgcactttcgatcgccctgagaagctgaactctcgcaccgacccgcagtcttctacacatactcggtcggctttgtcgagtcctctgtaccatgggctgtccggtgggacaagtacctgcacgtcttcgaccccaaggtgagctgctgcgctgctcccgccctccctcggcgctggccggctgctgacgcccccttccgttagatccactggttctccctcatcaactcgatcgtcattgtcgccttcctctgcgtcatggtcagcacgatcctctaccggcacgtctcgaacgacatcaacaagtgcgtctcttgctgctgctcggtcaatgagccttatcgcaaggctgacccgcgactgactgagctgcagataccacgcccttgacctttccgaggacatgaacgtccaggaggaccagggctggaagctcctgcacggcgaggtcttccgcgcgccgtcgcatccgctcgtgctttcgacgatggtcggcaccggcgcccagctgaacgcgatggtcgccgtcacgcttgtctttgcgctcctcggcttcctctcgccgagcctccgtggcagcctcgcctcgacgatgctcatcttctggacactcttctcgtgcatcaacggctacgtctcgacccggatctacctctcgttcggcggcgaggccgtcaagaagctcgccttcctgtctgcgaccctcttcccgacgtacgtcctactgcagagtcgtgccacagggggcaggtttctgacccctttccccttgtcccatctagcatcatatttgcggtcatcttcctcctgaacctgttcctcgtcggcgctggctcgtcgggtgccattccctttggcacgatccttgccgtcgtcgccctctggttcctcatctccgtccccctggcggtcgctggtgtttggttcggcatccggcatggcgctctcgagcacccgacgcgcgtcaacccgatcccgcggcagatcccgcctgggccgacgtacctcgagaagtggcccgcggcggcgctcgccggcctcctgccttgggcggctgcctttgtcgagctcttcttcgtgctctcgagtctctttggcagcaaggcctactatgcctttggcttcctcttcctgacgctctgcatcgtcatcctcgtgcgtgcgatcttcgtaccaggccgttcccaacaggatggttgaccgcacttctctcttcgcagacgacggcgacgatcaccgtcctcttcacctgtgcgtgctttccatcctctcgaacgatcgcctcgcccgcattgactttgatcctacgcccttccgccctggacagacttttctctctgcgccgaaaactatcgctggcactggtacgccttcacgacgggcgccggctcgtcactttggctcttcctctacggcctcttctacatgggttcgcggctctcgctcgacggcttcacgagcgtcgtactctatcttggatacctgtacgtacttgggcctgatctcctctacgcttagggctacccgcgctgactcgctctttcctcccggcaggcttctcctctgcctcgcgaacttcctcatctctggctcgatcggcttcatcgcctcctacgtggcgatccgcaagctgtatggtgcgttcgaccgcccgtgtcccggtagctggaagggtctcgctcgctgacgccgtgtaacgcctgccgctgtctcctcacagctgccgttcggatcgactagccagactgaaaagcgaagcgacgggcgccgttcagtccgcttctggcgggttgcaatcaatgactgctcattctattgcgacgaggacgtggttccccttcccgacctgcaggattgcgagcttgttgtcgagcaggtcggcctcagtaagttcaggaggtgagttcggtgcggagccggcagcaggctgcgccatcttgtcgccgttgaggtaaaggccaccgcctgcgatgatccgatgagcggcctctgcaaaagggtgcaatgcagcccgtcaatgacttgagacctttttttctggtcacgagagagagagagagacgcactctgcgagggaacgacgcctgccgcctgcgcgatctttgcgaatcgtagcggcagctcctcccgcttgtagcgcagcagccgtcggtcctcgctaaaggcagagaggaccgcatcgacggggagtgtccgagggttgcgcgcagagaagaggacgtcagtttggacgagggccttctcgaggccggattctgcgaaagggggaagggcgtagggagtcggtcaatagcgctcgcgccagcgatgcaaaggttcaagacaaaccgccgtgcacgagctgggtgacctctgcagccagcgtgcgctgagccgtgttgccgccaggactcgcctgggcgacataagtcagacaggtcagtcagcgagcgtgcgtcacttgcgactgagtgcacggtcagagacgcacggcatgctttgccatgacggcatcaatctgctcaagcgacaagagggtgaaaagcctcaggtagcgactgacgtcggcatcgggcgtccgatagaagaactgagggccaatctgccatcagcgctccgtccaagtcgcaagccgtctgcatcattgctcatccgcacctggtaaaagtcaaagaagctcgtcaagcgctcgtcgagccagatggcgttacccgcgctcttgccaaacttctctccgctcgccgtcgtcaggagcgggatcgtcaggccaaacgcgcgctcttgccgggcggccttgggcgcctccttgcgcttcttgccgggcgacaaagccgagtcggacgccagcgccggcgtcacatcggcgtagtgtcggtggatgaggtcgatgccggcgacgatgttgccccactggtctgagccgccgagctggacggcgcagccgtgattcagatgcaggtgcaggaaatcttgggcctgcaggagctggtacgaaaactcggtgaaagagatgcccgactctgacgccaaccgtgacttgacgctggaaagcgcgagaccggaccgaagcttgtcagctacgcgaaatgcagggcagccaggccagcaagtgacggcggagcgacgcacctgtccctggccagcatcgtctgcacccgggcgtgcttgccggtgccgcggagaaagtcgagcagtgacatctggccgaaccagtccatgttattgacgaccttgggcgtttgtacgggtccgacagcctcaaccttagcgtcgccgaccagccgagcatctgcgtacgcctggccgcgagcgaggaagcgctcgtactgcgcgttgatggcggagacgttggcctcaagctgggccctgtcgagaaaggtccgttcggacgaccggccagaggggtcgccgatcgtcccggtcgctcctccgacctagattcgagaaaggcaagggaggggggcagtcaggtccgttgcggcgcggaaagtgaggcactgcgccggactcacgagagcgatcgcctggtggccgcggatgtgaaagtgaaggaggccgagcatggccaggagattgccggcatgaagcgaggtcgccgtcggatcgacacctaggtagacggctagcggcttggagctcgcctggtcaaagtgctcgctgctttccggggagggttcagtcgggtcagaatgcgtgcgcgagagggtgctcgagcaggcagtcgcacctagtcaccgcctggacgaagcctcggctgcggaggtcatcgacgacggtcgagctgtaggcacgcaggcagcgctggtggaacggcctaagcacagaggacgacgtgaagcggtacatggcagttctctgtcgaagagggtcatcccgcgaagccaacttcggttcgtcgcgccgtctcggagggaaagacgaaagcgatgacggcctcgcctcctgctgcccctcgacaccatctctccttcctcccgccatgtcgaccagactcaccctcggccgtctctgcggccagtcctcaatccgggcccagcctgccttccatggccgaccgtcgctcgccgccgcccgcctctactcgcagctgcccaaggcctctgccagcccatctaccggtcctcaaggcattcaggcagctagctcgaccaaccccatgacggcagctccgacgtcgatacccgagatgccggagcccattcagctcgacacgaacctgcctcctccggccgaggtcgtgaagccgaccgagacgattgtcgtcgccgttccgccgaagggcgcgcacccgatgggtaccgccctgccggccgtcaacccagagatcgtcgagccggctccctccccggtcgtgatccctccgccccgagagtcggtcgtggttcctcccaagcatgacacatcggccgtcgtcgactcgctgacggacaagctcccatctgcggccgagctggcggccaaactcccaacccctccatctgcggctgatctcaagtcccagatgccttcggccgctgagatcaaggctaagctgcctacgccgccctcggccgctgagctggccgccaagatccctgagccagcgcccgtcgtcgagactacccctgtcctcccccctcctccgcctcctcctcgcggaccttggttcccgaagacgcggcgtgcattccgaaccctcgtctacctcaccatcggcggcatcggctacacctactattcggactcgtcggcggccgcgcactcgctcgtggtcatgccgcttctccgggccctgaccaatgccgaggacagccatcggctcgcgatccaggtccttcagtggccgctccggccggttgacaagggcgtcgacgaccccgtgctcgagactgatgtacgtcacgcgcaggacgctgccccgatctggaggttggcgctgatcattttgctgtcgctggctccagttcttcggccacaagctctctagccccctcggtctcgccgctggtttcgacaagaatgccgaggctgtcgatggtgtgcctgtcacacatattcggctgtagatggcagcactgactgactctgcgcatcgtttcaggtctctttgaccttggcttcagttacgtcgagattggcagtgtgacgcctgccccgcagcccggcaacccgaagccgcgcttcttccggctgaccgaggaccagtcgtgcatcaaccgctacggcttcaattcggacggccatgccgaggttctccagaacctccgcaagcgcctctataccttctatcaccgctacccggcgctctacaagccggctgctgccggcgagtcggcccagccgatccctcccgccggcctgccgcgttcgctcatccctggcaagctgctcggcgtcaacctcggcaaaaacaagacgtctgacgcggcttcggacgaggactacatccgcggcgttcaaacctttggccagtacgctgatgtgctcgtcatcaacgtctcgtcgcccaacacgcctggcctgcgcaacctccagggcggttcgcgcctcggcgagctcctcaagggcgtcgtcgacgagcgcgaccggctcaagacggtcgacggcgtgctgcccaagctgctcgtcaaggtcgcgcccgacctcgacagcgaggagcttgccgacattgcaaaggctgtcaaaatcagcggcatcgacggcgtcattgtcagcaacacgacaatctcgcgcccatcaacgctcaagtcttgtgagtgacaagcttccctcagtctgtgtgtaggctcgacgcagctcacaccccgggcattctgtcttaattagccaacaagcgcgaggtcggcggtctgtctggtcctccggccaagccgctcgccatcaaggccctgcgcgcccttcgtaccgagctgccggcgacggtcccgctcatcggctgcggaggcatcacgaccggcgaggacgcgctcgactttgcggccgccggcgcatcggccgtccagctctacacgtcgttcggcttccgtggcgtcggagcacctcgctttgttaaggacgagctagccgaggcgctcaaggctcgggggacgagctggcaggccgtcgcgggcggcaagagcctgcccgcgctgctcgatgccgagaagcgctagacgaatgcaggaaaggatgtcgctttgcacctggctctcgtctcctttgcgaatcatgatgcgaagagatggggatgcgcatgtggcggccatgagtgctagagggcgagtgggatgatgatgctctgccgcgtccgacgtttgaagagcccgcccaacgcccaccgaccgcccgaacgagctcgaccgccagtagatcctctcccagccagctcgcccagagaaacattcgaacagagacccagcaccgatggctgaccgcgtacgtcgtcgcttctgattctgatctgctaccgatgggggccgcatccgagagctgctggctgcgagctgcttccctgacctcgccctgcgagacccctggctgagcccctgcttgcctcatcccatacggactgcgccaggcggcagctctcgcagcactgaaggccaagcggaaggcgagggatgtgccgacgacagcaccctctgtccgccgagctgcaccctcggcgcctgcgccgctgtcgtacaaaacttcaggctcgtcgtcggcaacgacgtcctcgtccggagtaggcggcagcgcgcccaggatcctcgtcctcgacagctcgagcccggccaagccgccattcagctcacgcaacggcgctcagaaacgtggcccgctcccgccaccggcagcggcgccaccgaagcggtcgtacctcgattatgacgagggcgagagcgtcacccggattgagccgcggggtccggcggacgccgccagtgtgccgctgtcgtcgtccccgctcgcctctggctctggctacttcccgaggccagagaagcggccgggccaatcgtcgctctccaagagcagactcggttctggcgcgtcggtcatccctctgcggctcggcgccgacggtaaggtgacggacgacctcgatgacgacgacgacgacgaggatgaagccctgctcggcacgtccgccttcaagcgactgggagaagccacgtcgtcctcggcctcctcgatcgcgccgtcgcgaaagctcgtgcgccataattctggcctgtcgtcgcgccagagcagcccaggctcgcaggcgtcgacctcgacggcagccaacctcgccgcccaattcagcgacgcgttcatcgaccaggacgagccgaccatcacgcgtttcgcaaacatgtttcccgccgtctcacgctcgcgtgtcgtcgaggtcctcgagaagagcggctgggaggccagcattgccaccgacatccttctcggtttctcgtcagcgctgcacaactctcacgatgtcgactcggacgctgccgtcgatggctttgagattgtggaggtctcggccaagtccaagggcgtctcggccatctacgccaagaggagaatgtcccacctcgacggacgcagccagaagaagaagaagcgccggcacggcaacgcaagtgactcgggcagcggcgacgattatggcgacgatggcacgtcgcgtcgcaagtcgggtctccagaagtgggagcgtgatgaggatcaagaagaggaagaggcgctcgtgcggtcctccctcctgtgtgtcgtcccagcctgccacctggtcgctgactggcactgctgccccccccccccaaacctcgcaggtctggttcaacacttgcacgccagaagagctgctggcgatcacgtcctgctctgccctgcaggcgtcgtcgatcgtctcgctccggccgtttgagtcgacggacgatctgcgggcgaagctcaccaagaagaagggtgtctcgccgcgcctcttcgacggctacatcgaggtcatgcagggctaccacgaggtcgacgccgtcctcaagggctgcgagaaggtcggccgcgagctcgagcgtgcaatgagtgctttcatgcagctcaagggagaagaggacgagacccacgcgggcgagctgagtgtcgtcaacgttgacattaacgttgagcaaaagcttgccgaagagacagacgagctccgtcgggaagcgctcaagggttacttgaaggagcagccgagctcgatggcagaaggcgtccagctcaaagactaccaggtgggtccgacctttcgaaacttctttcgctgtgctgaacgcgagcgatccttcagctgctcggcatcaattggctcaacctgctcttcaatcgcggcctgtcgtgcatcctggccgacgaaatgggtgaggcctcccgagtcagctctaagccacgcgacagacactaacagattgtcttgttgcctgtccaggtctcggcaagactatccaggtcatcgcctttctcgcgcacgtcaaggagcaggactttctcggccctcacctcatcattgtcccgtgcgtctctgtcaggatcctttgtcacgcggaatacagctgagcctgaatggcttctcctcgcattcgataacccaggtcctcaacgctcgagaactgggctcgcgagtttgcccgcttttgcccgacgctcgaggtccagacctattacggctcccaggccgagcggtttgagctcgccagccactttctcaacgacacctcgctcgacgtcattctgacgacgtatcagatcgcgagtggcaccaacaaggacgaccgcaagtttctcaagcgcatgaagttccaggtacggttcacgtctcgccgcctgacattctgagcgcagctggtgacctgccgagacgaccttcagactgccttctttgacgagggccatcagctcaagaactataagtcggcgcgctacaagacgctaatggacctgcccgtcgacttccgcgtccttctgaccggcacgccgctgcagaacaacctccaggagcttgtcgtgcgtcctcttcgtcagctgctcctggcgagactggcgagacaccttttgacgcatctgcctactttttacagtccattcttaactttatcctgcccgactacttcaaggacgccgaggactcgctccgggcgatcttcaaggtcagcagcgactcgcacgcaagccagctctcgcggcagcgtgtctcgcgggcgcagaagatgatgaagccgttcgtgcttcggcggcggaaagatcaggtgcgcaccggtcgtcccgcatcactggagagtcatcagctcactagcgacgacgtcgttgcccttccctcaggtgctaaaggacctgccgaagaagaacctctttgtcgaatactgccagatgaccgagggccaagccgagatctaccgcgagtccgaaatctcgtcgtcaaagacgctcaagacactcgccgccgagaccgaaaagaccaagaagcgtgggccggccctgaaaggcgcggaccgcgtcatcggcaacctcgagtgggacaccggcccgtccgacaagaagattggcgactctggctcaaacgtcctgatgaacctccgcaaggcggccaaccacccgctcctcttccggagtcattacacggacgccaagcttaaggtgctcgccaaggacatcatgaaggagccggagcacatgtcgaaggactacgcctgcatcatcgaggacatggaggcacgttcgcctctcgtgagctactgtgcgcctcattgaacgcagctgaccccgctttgtgtgggtcggctctcgcagatcatgaccgacgccgagctcgacaatctctgcaagcagtacaagtcgacgcgccgacatgccctctcgcgcgaggccttcttcgactcgggcaaggtgatggtcctgaagcggctgatcgacgaggctaaggcgcagggcaagcggctcctcgtcttcagcatgttcacccaggtgctcgacatcatcaagcgcattctcaacgagtgggagatcaagtgggtcaagctcaccggcgagaccaaggtcgacgagcgacagaccctcgtcgacgagtttaccaacgacgacagcatcaccgttttcctcctctcgacgctcgccggcggcatgggcatcaacctgacggccgcctcggtcgtcgtcatgtcagtcccatcagagcatggcggccatcccgttcacagactgacgggctctcgctcggccttgcctcgtgcaagctatgaccaaggcttcaacccgcacaacgaaaagcaggccgccgaccgcagctaccgcagtgagtcaagctgccttccccttccgtctctcgccttctgacgaccgctctttctttgactgctcagtcggccagacgcgcgacgtcgaggtttacacgctcatcagcgctggcacgatcgacgaggacattgacgacctcgctcgctcaaagctcgcactcgatgcggccgtcgccggccgcgaggacgacagcagcagcgagaacgctaccgaggccaaggccaagtcgtcgctgctctcgaaattgaggaccaagctcgatatcaaactagacggtcagcagccagaggccagcaaggagatggccgcctcgaatggcggggggtcgaagaccgccccacctccttcggccgtcatcgacgtcgacatggagccctaggcggtgggtggaccgatgctgcccatcttgttcctttccttgctgttgtagcaggggcgtctagactcaccgcccctgggatttcatgtactcgcacagtctgccgagcgagctggcagagatacaaaggggggttacatcgcgataggatgaaggctcggcgggtgggccaagatgcagcggccgaccgctcgggcaaacgggtgcggccggtggggaagggtatagcccagagtcagaatagggaatcggctgggagggaagctgatcactggaagtagacctgcgtggcgcgacaaggtaagggcgcgcgtcagcgctccccacaaaagtgcctttagccagtccccgacgtacctgagacacgtctgagacggcaaaagcgaggttgcaagccggacacttgcgttggcgggtcgagatgcgcgagtctatgcagtccttgcagaaggctgagagcagagacagatcgagcgtcgttagaagcagccaaaaagtggggagacgcaggcggagcgactgactgtgcatgcacttggtgatgcagtgagaccggaggcgcaaagaacaggtcgagcagcggaggatggactgggtttgagcaggtgatggcgagcgtcagccagcgacagaagtggacggcgagcggtcgagcaagacgacgcacgtagagcttgtcgcgctcctcctgaagctcgggatcggcggcgaccgtgccagtcgcggcggccgagttcgtcgccgccttcaacttgacgagcgccttctcggccttctcggcttcacgccgcgtgcgcgagagctcctcctcggcccgcgcgagcgcggctcggtctcggtcgccgtcaacggccttggacgccaggatcttctcgaggtcggccgtgcgtgagctttcgctctcgagcatacccttcgtctccatgtattgccgctggaggtcatctgcgcgatcctgttgggactgcagcttcttttgcagctgggtcacctgctgctcttgtacgccctgcgcgacgatgaccgcttgggtcagcagagcttcagacggggaacagtattgttcgctccagcttcaccagctggataccgaggctcttttctgatgccgacagcttttcgatgacgacggtctgcctctcggcgttgcgcgcgaggatcttcttctcgccatcgacggcgtccttggtccgcatcgccgcaaagtacttgttgtccgctttggctttctattaaagcaagacggacgagatcagagcgtgtacctctgagcggtttacgttgcggcgacgcacttcgttgagcgccttggcgagccggtcctccatctccttaagattgaagaccttcttttgtgcttgagcgctggcctcctcccaggctcccgaaagccgctcgacctcggagtagagcgcgtccgttgcctttcgcgtgtcaacagtcggtcgagcccgtcagcctacgtcctttacggcgaacattgatggctaaccggcgcaggacgtacagtctcattctcgcgcaacttgcgctccactgtctcgagctcggcttgcttgtcttgcaggcgtcggacgagtgctgccgagtcctcggcgagagctggctccgagcccagcaccttctcaaaggcggcgagcttgactcgaaggacggcgagctcttgctggccctgcgagtccgcctcgaggcgggacagcagggctgggtcggtcgagagcgcggtgatctggccggtcagagcgctgacgcgtgcctccgtctcggtcaacttcgattcgagcccaaggacgtagtcggccgagatttcgggagcggccccgacctctcggaggaggaaggcaaaaagaggctcggacccggcctcggccgcgagacgggccttcagccgggagatgtctgacttgagtgcgcccatccgagcgtcggccgagcggacgagggcttccatctcgtcggcgtgccggaccttgaccgactcgcgagccttcttctcggcgagccggcccatcaggtcatcccgctcgccccgcaaacgaccgagatcctgctctcgcttcgagagctgcgttcgcaagctgtcgatctcgacctgtgattccgactaaaaggggcgaaaaagagatctttaggtcagctggagtttctgtgaaaggccagaccgcgaagcgcggatgactgacagcagcgagctcctcgaacgccctcctaccgtcgcggaggctatcggcctcgacgacgagcgtatcatactcctcgcgtgactgctttgcctggcgctggaagtgatcgagctgggcaagcaggcacttgaagagcgccgagccggtgacgacggcctccggcgggtgatcgacctccagccgaagccggtcgaccgactgttcgagccggacgcgctcggtccggagtgtactgatctcggccagtcggctctcggcgagcgctcggtcggccggatccggcagcgtcgcctcgacgagcgacgccagcgacggctgcgagacgctgggatcgagcttcactcctacgccgccgccatcgccgccgaccgcccctgccccgtttagcgcggcgccgttgacgaggccgggcgaggtcgcgccggagatggacggcttgcggtcgatggcttctgtctgcgaggggcctgcagccgacgtcgagcccgggcgcgcctcaacagggagttgaccgatgatgctctggcacctcagccggtcgagctgcttctcagcccgcaagaggtcggccgccgtacggtcctgctcagccctagcggccgcgagctggccagcgagcagacgagccgaggcctcagccgtggcgctcttgcggccctcggccccacagcgctcgcgaagctcgtcggcacttgcgcggacgcctctgccagcgagctcgacgaacttgacaagcagagctttcgtgctttggctccgctggtcgacagccttctgcagctctggcacgtccgcgtcatgctccggaaggactaagggtgtgaaggtaggtaacggtgatgagcgactcttcttcgcacaggccagaaagcgcgccagagtgagacgccgcagagagacgtacgtggggaaggagccgtcgtaaatggagacgcaggcaggttctccgtccctacgagcccgcgaacggcttcgagtagctgttcgcgcaatcaccaatcaccaagatgacattcagaagccttcagtcatgtgcgcttctcagacaggaagtcgcgaagcgcagaagaaagacgcacctcgctccagcagacttcgatcccttgcagacccgcctcaagcgcagcctttcgccggctgagctcagcgacccgcgcggccgagcggttgtgcaggcgcttgtactcgagcatctgccggtagatggcttccttgcggaaggtctgaaaggaagcagaacaggggcagcgggtgaggtcagcttccgaccgaggtcaagcacagccaacaggggaatgcgcgacgcggacaaaggaggactagtggtgcagacagactacagagcggcacagcaagcagcctgtcgctccagctctcagctcggcatgtccccactggcgagagcccatgctggaacggagctggagaggctctcaattggaggcaggctccgtggcagaccgagggcagctcgtgtgcgaggcgcctctgccggactcagcgcgccgccgatcaagcagcagggccatcgagcccatcatgccacataacgctctgacagctgccgccttccaagacagagtggcgggcagcgaagctcgccttcgctggtcgacctgaccacgaagcggctcgcgacccgcccgcctgctgcagccgccgctctcgtctcccctctctcttccgcccgacgagtgtaagttgcaatcgactgacctcgatgataggcgtcaatgcgtcctgtgcctcgtcctcatcgtcgcttcctgccgccacgggcggcgccgtcctcggccgcttggtcgggctcgctggccggctgccgctcgcgctgctgttgctgccaacgccgccggccgagggcgaacctgccgcccggcgcttacggtcggccagcgctgaaggttggcgcatggggacttccatctggaggtcttttgctggcggaagaggcgagaggataggtgggagacgggagcgggatggagggcgaaggaggcagcagggcgagcgaggcgaaaagccagggcgaggtcgggcaggcgcgcgacgcggccggcggagcgagctgcagcagacgggcaggcgggccgctctcaaagctgtcctccttgagattgtctccaggaagagcaagtagggcaagacaggctgacccaggacgtcgccccgtatcacgactgtggtcgaaccggtccctaagcgaaccggcctgcctggcggacgggctccaggtcgtgcgcgcagcggcgagcagagagcgccgcgcggcagtagcaggctcactcgcttttcctggactatccttacgaggtcgtctttgtaggcatccgtgacgaacgagaaggtgatggttccgtgccctgccgagcgggcttaagacgggcgttatcgagccggttgtcatctctcgcccgtgcggcagttgagtcgcgcgcgcgcgcgcgaaatctcgaagccgaccggccgggcgaggcgttggacggctcgaaccctgaaccaccaccagccagccttttcccgtcctttctctcgcagccatggcttctcgttttggtcagtggacgtctgcctggcctgccgcacctcggctcagttcactccggcgcctggccggacgagcgggctctcatcagagcagcactgcgctgacgcccccttgcgctccctttttccgcttggcccttgccgcctggctcgccctcgaccccacctgacgtgtcgtcctctcgtagccactcgcgctgccaccacccgtcccgtcgcccggttcggtgcgcccctccggcgggcctacgccgctggacccgatctcgacaaccgggtcgtcgccgtagagcccgtcgtacgtcctcttcctcttgctgactcgcacgcgcgatcggcaacgggcgggcgccattgccgcctcagggcttcctacccttcccttccctccgcttaaaacccagcctgaccctctccgtcccgtcttcgcgccgcaacagactcgtttcaagcggttccgcacgacctttggccgtgtcacgctcggtgtcctgacagtcgccggcgctggcttctttgcctgtgagtgctcccctccccccttatccgcgcgagcgagacccggtggctgggcgccaaagtcgtacttctgagccaaccgacaggctgacctcccttctctcgcctcgctcagcgacctacatctcggccaacccgggagagcagctcgaccaggaccccaagaagaagaatgttgtcgtcctcggctctggctggggtgcgaccgccttcctcaagggcctcgacaacgaggagtacaacgtcaccgtcatctcgccccacaactacttcctttatacgcccctcctgccctcggtcaccgtcggcacgctcgagggccggtctatcatccagcccacgcgcttcatcacccgccacaagaagcgcaaggtgacggtcgtcgaggctgaagcaaaggaggtcgacccgatcaacaagacggtcacctttgtcgacaactcggacgtcaagggcacagtcgagtcgacgacgatcccgtacgactacctcgtctacgccctcggctgcgacaaccagacgtttggcatggccggcgtccccaagtacgcctgcttcctcaaggagctctctgacgccgacaaggtccggcagaaaattatggactgtgcgtaggcctgcttgctgcgccttggtgagtttgtccggctaaactcgcgctctctccgataggcgtcgagtcagctgccttccccggccagacgcaggaggagatcgaccggctcatgcacatggttgtcgtcggtggcggcccgaccggtgtcgagtacgcggccgagctccaggactacctcgtcgacgacctcaagaagtggtaccccgagattgccgaccggctcaagattacgctcgtcgaggccctgcccaacgtcctgcccatgttctccaagaagctcatcgagtacaccgagtcgaccttcaaggacaaccagatcaacctcctcaccaagaccatggtcaaggatgtgcaggagaagcacattaccgtccaggacgccgagaagaacattaaggacatcccgtacggcctcctcgtctgggcgaccggcaacacctcgcgcgccgtcacgcgcaacctcatgtcgaagctgcctgagcaccagacgaaccggcgtggactcgccgtcgacgacggcacgtttgagctcctcggcgccgaaggtatcttcgccgtaggcgacaacgcggccaccaagtacgccccgaccgcgcaggtcgcctcgcagcagggtgcctacctcgccaaggccttcaagggctttgccaagcgtgacgttgccctcgccgagctctctgccctcaaggccaacccctcgacgacggccgagcagctcgaggccgcctccaaggccgtccagcgggcgtccaaggtccggccgttccactactcgcaccagggctcgctcgcctacgtcggctctgagaaggccatcgccgacctgcccatctttggcgccgacaacctctcgtccttcggcggcgcgaccacctactggttctggcggtcggcctacctctccaacctctactcgctcgtgcgttggcctgctacagttgccgctgcctctgtctggattctgcggctgacccttccccttctcttgctttctccagcgcaaccggacgctcgttggcaccgactggctcaaggtaaggcctcccagcggctcttgagctttcgacttattggctgaccctgccgcctctcaatctctaggtcaaggtcttcggtcgggacgtcagccgagagtaggcaaattcttcgctcgatcggctcctctcttctcatttgaaaagggaagcgctgcgctcaaggcggacgccgagagaggtgtcccgtctgcgccttcttcgctgccggggactctgtccttccccgccatgctttccttcccctcctttcttctattccggatctcaacccaaaatcgatagactttcatgcactctttgcgacacgtggcattggatcgcaaccggcagaaatcattctagaggggcgggggatgagcgccgccgttgcagatacgtccattgtcctggcgaacctcgagccaggcgccgaaggcaccacaagccctcgactcggccgcaccgatgccaaggatacgaccggcgagcgagcggccgttccaagggggaaacatagttgcgttgcagtgccagccgccctgctcgacaagcgaaacgacgtcaagctgccgtcgaggccgctcgttcaacccgttcggttttgcggaggaattcgacgccgaggcgacagagtcgaggaacgcctcggtctcgtttgcaaagacctcggccgagccgtactggacgaggaggcgtgttccattcgcctgcagcttgcagaggatctcgtcgagcggccgagttggcgagcgtgcatcgccgttggccaggtgactgacggccatcgctgcagccccgggcgagtagaggggatgaccggcctgaagacggaggaagctgctctcttgcagcagctcgggcgccgggatggattcagctggcccgaagggctgattagcagcggtgaggatattgtgaaggtagcagtcgcgggcgacggtgatctgccccaggttgagcaggtctgttcgtgtgttgcggatgaggccaggatgtgagagagagaggtcgagccatggctgtttgttgcgccgcgagaggaggctcagcaacggagatgatgagcgagtcaccgagcgcgctcggacactcaccgagaataaggccacccggccggggacgccgagagccagcgtctcgtcgacaaggctgaggtaggccgtcaggctccatgacaggcctgcgccggcgctgtcgcccgtgacgacgatgtccttcggcgcaaagccgcagtcgacaacgaggtggtgccaagcggcgagaccatcctgcagcgcggccggaaaggcgcattcttgatgaacagcatgccggtactggacgccaagtaggcgcgcattggtcggagcggcccgcaagagcgaccacggaaatggcccgagcaacgacgttccgctcctggacaaggggagtgagcgcaagaggtcagaacgacgtcctcggcggacgctgggacgccagactcacacgtagccgcctgcatgtgcgcaccagtcagcctgagagtcagcgctgcttcctagagtaggcaggtgtcgtgacgtaccgccgacaaagtacaggatgacttgctcgctaggtcgagcgctgcccaaggcgtcatcagagccgtccttccaaagccaggtcgcagggacggcccggcgcttgactcggccgaagcccgtcttgacggcccctacgcacgctctctcaggagccgagtcaagaaggacacccttcgagcgcaactggaggccgtcctcgcttgcactggagaagaagtaggccgagaagcgagggacaacaccctcgaccgccggagggaagcgaaaggggaggtcgttcggctgggttgcaggcacgtgtccgtacgacagagcccagacgagatttgagatgaaggggattgtcacattcgacaggagcctgtccagattcaaggtggactctcaggatgagcaagtgagcagatcaggggggagcgctcagacaagcgcagcagccctggttgtcgcagcgcaccttcggccttcgaccgccggcagcgccggcacgccgagcgcgagcaggatgccgccccaaaggacgagcgggagaccgacccagacggtccagatgagccgagcgagccgaacgagatgtgaggcagggccgaccgttggcgtgaggggctgtagcgagctcggagggaaccaaggtggctggagaagcgtctgagggatcatggacgtccgctgaccctgagaagacagccgttagggcaaggaggtgcacgtgtcagctcatgggactagaggcgaggctgggcgttgtacgtactcggctggcctagagggatgtggctgagcgtcggagggcaggcagcggtttggccggccggccgtcggagggacgattcagacgagacgcgcgcgcgcggccgctctatgctgatcgagctcgacgtcagcgcccgctgggtgaaggatggtgtgtgcagcccatgggtggaggcagctcaatgggtggaggcatggtgtgtgtgtgtgtggggtgctgggtcgttccgtcaaggcgaggcggcatcgagaagaggttcgtaaagcgacattcggaaaaggacgggcgtgtgtgtgaaaaggggacgactgcagaaaaaggggagtcacgtcaagcccccctttcatcgaccccgtcccccgccgccgccgccgctgccgccggcgagcgagctcgtttggctcgtccgccttcggaagacgaaggacgagaaggattctcgcgaaggcggcgagcggagccacgacttgtcggcacctgcaccagcggcgttggtcggggttgttgggctcggagacggctggcggtgctgctggtgttggtgttgctggaggagggaggtgccggggtcgcccctgaagatcttgactgtgccgcgcactaaccgcgggaagggacatgaagggggtcaaaaggcgagaaggaaagagattgggacgggcgaagaaaggaggacgcactagtcgccacagcgatcagcggcgtgtcgagcagcgcgtcgagctctgccccgccgagcgtcgcgcgcgagagcgagcggacgaggtcgagtgagcgttccgagagcgggctgacgagcccaaacgagcggcggctcgtcgagggcgagagggcggcgaagggcgagcccgggcgcgagaggggcggtgcggggtggcccgcgccgttcgagttgccgctcccgccgccgtggttggggtccgacgggctaccatggtggtggtgggcgtggccgtcgtgactgacgctgctgccgtcgaccggaaggcggtagatcaggtccccggccgaagcgaggagcagccgcgtgctgagcggggccatgctcgcacaagcgacgagcgagctgtccgcttcgaaatggagcgagcgcgagccctcgctcccgtcgcgcggccagtcggtcgaccagaggaagcacccgccgtcctcggagccacagacgatccagcgcccgtcgtcgctgaacgtcgccgcgatctgagacgacgtgttctggtggcccttgagcttgcggtcgacagaaaagtcggcaaggcggtagagccggacccggctgtcgtttgacgtcacgagcaggcgctcgtccggcgctgtgccgccggccgtcgcgacgaactggaggtgcgtaatcttcttgcccttggtgttcttgccgcgcgttgaccggaccttgagctgcgtctttggcttgagcgtgtcggagaagaagtggacccggccagagaaggtgccggcggcggccgtcttgccgtcgacgctgaaggcgaccgccgtgcacatctccggcagctcggccgcgcaccggaccttcttttcgatgatcgaccagatccggaccttctggtcgcagcagcccgagcagaagaagcggtcgtccttcggatggaaggcgagtgaggtgacgaaatcgggatgctggaagatcgtcaggcaggtcggccgcgtcgggtgccacaaacgggcggtctgtggaatgtaggggatgagatgtgtcagcgctcatttcgataaaggaagaaagggccgcagcgcaccttgtccatcgagcccgaggcgaggaagccgttcttgctccagcagagcgacaagacgccgtcggtgtggccctgccagacctggcacggctcctcttcgaggacggctgacgcgtcgccagcgcccgacgacggcccggcagcagcctcatcggcgacgccgtcgatattgcggacttgatagatccggatgatcgagtcctggccggcggtcgcgaggtagcggccgtcgtaactccactcgaggcaccaaagcgccttgcccttggccggctccttctttcccgcaccgccctgctttcggctcgtgctgcccgagctgctcctgcgcgacggctgtgctttggccccggtcgcaatcggcggccgggtcgcggtgttgctcgtccgcagaggcgaaggcgaggtcggtgaggcggctgaagcaggcgaagacggccgagagcccgtacgagactcggactgaccggtcggccgctccactgcctcgccgttcgccgaaatctgcagcggctcgtccgtcatttgcttgcccgtcagaaccgacaaggtctcgaccgtcgagagcgtctgggcgagaaagatcttgccgagcgtgttctggctgctgctgacgttcttcgagtgcaccttgacgtacttgcgctgctgattgcccttggcgggcgacgtcaggaacgacgaggcgaacgacgacgaccgcttcggggctggcatcgacgttgccgaggtcgagctctcgaacgatggccgggcgggtgaccctgggcttggtggggccgtcgacgaagagggcgaagaaggctggaggttcttaatgactcgctgaagcagggacggcttccgcttcggaccgccgaagcgagagccgttctcactctcggacgcgcccttgcctatcgtttggccctgtgccggcgccggggctgtcgagagctctgtcacgagcggcggcggcgccgcgactggcttgcggccgctgatgaccggcttgtcgaaggaggtcgaggttcggcgagagctgctggccttggtcgccgagctgctgctgaggatcgtcggcgagttgccgagcgtgtcctcggacgtctcgctctcgcgccggaactgatcctgcgtgtcccggccgaacgacggctgggtcgcgaggtcggccagctcgccttcgtcagccgtgtccgagtcggacgcggctgaggctcgggagagggccgagtggaagctcgagctcgcagtgaagagggtggaactgcgactcccggtctgctgcggctcgtcgtcgctcgaggaggcgccgccgaagctcgacaaaggcggtggaggggataggggccgggtcgtcgggacggcgagcggggcgagggccattggtgagtagctcgagccgaagaagcctggcagagggtggccataaagaaggtcagtcgtgcgctcgagctgcaggatctatcgatcgtatgcgtcaagccagcgccagcgaaacttcagggatcgtgatgatggggaccagaagagcgggccgggccggctcggctcccgtgagagacgagctcctcccgaccggcgttggccggctcgtacgactaccagcacagcccaactgacgatccagaagcctcacccgagggacggcgcgcagaggatgggagctgggtgtctctggaatgagggcgtcgcaagaggagcagggcagccagatatagcgcccagctcgaccgaggctcgctgacgcggccagagccagctgcttgctgcccgttgtgcccgagcctgctcgtcggcgctccctcacgatcttctgctccgacccgaaaggctcgatgggacgcgcgacgcacctttctcgctccgtccgctcggggacgatgcccggaggccgccggtcctcgcgctcctagcccgggtaccgtcgcccgagccgtcaggcgtcgtcactgaccggggcgccgcaacgagcagttcggcgaggccgaacgacaactgagctggaagcgacatcttggcgaacgagtgatggatgggcgagacgggcccagagtccttgacgggcgaccgggcgcgggaagccggttgagaggtcggcctgccgttggagaaggcaggtgaggtcagcactcagacaggttcagaccgacgccctccacccacccctttcgccggggccgcgcaggatcgatcgccagggggaggggcgggcgagacgcacatttgctcgcttggccgacgtcggaatggtggtgaggaggagcgatgctgggcggtgatgaggtcgtcgtcgagttgcgtcgaggtcgagggcgacccggtggctgtcggcggatgagagtgcgccgggaccgaagctcgtgccggcggaggagcggcggcggtcgacgccatgatgaggcggcgtcgagggtgtgtgtcgggataagaggcgttcttcttcagggcgagcgaggtggctcaccagccatggcgagttgaagggacggccttgtgacttgggaaagggacgacgttgagggcagcaagcaaggccagcagcagcaggagcacccggccagaggtcggaggccgagggttcgacgtgggaaccctacgcagcgccgaagagcaccgcttgacgcgccgtcgcctctgctttttcgtcggcgaaacgttgcgtgctgttgctgaccatcacggcccctcgtcgagctggctgctgacggcatggggagatcccgacccaactggtgagtccgctccgtctccgcccctcccctcctccgacaggatgatcgcatgtcgccccagtcggaagagcctgaattcaaccctcacgctttgacgatccgactagagtgccgccaaagcctcgcttctgatctccctccttcctcctggcttccttttcctttcctcgattgacggacgctgaccctctgcctctacctcactcgatgaccaaacttcctcctcagaccggtctgcctgtgcctgcagcccactctctcccgtacttgcgatcgatgctttgcctgcgcccaaacctttcctccgcctccgtttcatcaaagggtcatcgaggcattcgtcgctcagcgtttcccagccatgcccggcagctggaaggcctcaaagagcctttcggccgggaccgcccatccagcctcggtccgagccgcgacagcgactgtcggcgcgacctttcggcccgtcaggacgccgacgacggcgcctgagtcgacatcgagcactggcgcgccggccgagatgacgagcggtggcggcggcgggtaaatcagcatgtgggcgagcgtgtcgtacgtgccggttctggaggagaccgaagagtctcagcggccgcttgagcccttataaaccagaaggagatgaacaaactgagctgcgttgcctgcatagtcccggtagccgacgacgacgccctcgacccagcgccagccgccgtcgtcgagggtctggcccgcccaggccgggtagcggacgcgcgtctcgaccggcgcaggataaggcgagacgggcaatgtccggaccggctcagtcggcgaaagctctgaaacggtgaacaagaggagaggactaggcgggagggcgctgacgaccgatgtgatgctgcgtgctagcgggccggatgagatcgcctgcgagggaggagagcgggtcgtcaaactcccttccgcgacgctgatgaggacagattgctcgtactactgccgcagacgagttcaagtcctcgctgaccagagatccgtgactcgagccatcctgctaccgagataggccttgaggtcagcgcacgcttcgtcaagtcagcgagggatggtcggacaccgaccctctggaagccctcgagcgcgacgaaggtcgaccgctcgggatcgccatcgatccctatcctgaacgtcagcgaggtagcgatgtctctgccgactactgcgaggatgccgacgccagagacgggagtggtcaagtcgaggtcgacgcgccggccgcgcgcaggcgtcgactcgtacggcagctcgaacggaaggacagcaccggcacgcgcggaaagctgctcggccagcgcggcgagcgacggtgatcgatccgagacggcctggcggaggagcgaggcgaggatgggtgagataccaggcgcgtcgacggagggctgcgtcgctcgttgaacgccggcggtgacgcgggggagcgagatgggtcggccggacgaggctgccgtcgcgagagcccgagcgagtcgagcgccacgcaagtgagggggcattctgctgattagcatcctcctactgctactgctgctgctgctgctgctgcagttgctgctgatggtcaggttgagggaggccgtcgttgcagagagggtagcgacccacgcgagacccttcagcttcggtttccgccgacggcgaaacgaaaggggcgccgtctcggagggacgggcctctccctcttgaccttcactcctacttcaaccatggcctcgctcgaacgcagctcgtcaggccggagcgctctgacggtccacgagacgaccgaggccgacctcgacaccaagcatcggaacggtgccggcgccgtcgccgaggcccaccctgctgccgctgggagcatgacggtgccggcctacgtcgagaaggcggccggcctggccgccgaaaagaacatttcgacggacgaggatgacctcaatgacgacgagaaggatccctatccggatgtccctgccgaccagaggggcacggcaggcctccgtcggccctggtccgtctcgtgcctcaccgagccgaacgtctgagagcccgcgcgctgaccaagaccgatcgggccccttaatcaacttgccctctcgcaggtggtcgtacatccccttcacgcgcaagtttccgccgccacccccgccgcgaacgatggacgatgcgattcgctcgcccgagttctcgaccggcttcatcggtgggtcccctccaggttgcaagggcctttgagaggcgtcggcgctgatcgaactcttcgttgctctgccgtagggcgccacatcttcagctgggttgagcccatgatggtactcggcacgcagcggacgattgaggcgactgatctctgggagctcgagccctcgtttgcctcggccgagctgctgtcgaaccggctgcaaaccatctgggagcgccgccaggccgaggcggcggcctacaacctgcggctccacaacggcgacgtcaaggccggctcttggcctcggctcaaatgggcggtcggccggggtaacgaggacgagtggcgaaagacggcgcgcaagcgggcgagcctcatctggacctgcaacgagctcgtaggcagcctcggcaaggcgcgaaacgcgtccgagtcgtccaagagcctcaactggtggtggattggcggggcctacaagcgttgcgtccgcctcatccttctcgattccacattgacgttcgctgacgcttctgtccttccgcttcagtcgtcggcgactcgacgcagatgctttcgccgctcctcatccgttacctcatcaactttgtccgacggtccagccaggcccgagcggccggcctcgagccaccacccatcggccaaggtgtcggagcggccataggtctgtctctttgtttcctgacggcgtcactctgcaacaacttctttttctggcggaccacgggcagcggcgtccttcttcgcggcgcgctcatctcgttcatctttaaccggggccttcgtctgacgggcgaggagcgcgcgaaaggcctcggaaacggcaagctcaccaaccacatcagcaccgagtgcgtctgcctgtgctccagtccatctgcaaagcgcctgatctgaccctcccgactctttgcagcgtgtcgagagtgagtctgccctgccctcctgccctaagcctgaaggccacagctgacaagactgtgcacgcagattgactttgcagcaggcttcttccacctgatcatcgtggcgcccgtgcagatgtcgatctgcctcatcctgctctgcatcaacctcggctggccagccgtcatcggcttcgcctttttcgtcctggtcgttcctctgcagggccgcgcgatgaagactctgatgagcgagcggatgaaggcgatggtctataccgaccagcggtccaagctgatcggcgaactgcttagcggtgagccgtcctcacagtctcccgtcctcgtcaaaataagctgacttcatcatcttcactctttgcagggatgaagctgatcaagctgttcgcgtgggagaccccttacctcgacgcgagtcgcccctctgatcgatagctgaacgacagcaagcgctgacgccgactgactcaccatgcagcgtctcaacggcttgcggaccaaggagctctcgcacatcgccaagatcatggtcgtccggtcggcaaacatggccctcgcctttacccttcgtcagtagacgtctgctttccgtcctaaatctcgctcgactgacctcacttcttccccttccagccgtcctctcctctgtcatctccttcgtcatctacgccgccgtcaacaacggaatcgacgcggccgacatctttgcctcgctttcactcttccaggcaagtctgggctggctgtctctcgcatctgtcgctgcctatgctgctgaaacgtctgtcactgcatctcacagctcttgcgcatgccactcctgatgctcccgcttgccctctcgtcggccaccgacgctcggaacgcctttcaccgtctgacgccgctatttgaggcggcaacgctcgcagagattcagcaaaagattgactcctcggccgagcttgcgatcgacgtccgcggtgccagtttctcctgggactcgccgccgcctgtcgaggtcaagggtaaaggcaagaagaagggcaggttcgggcgcaagagcggccggacatcgcccgtcgcagaggcagagactgctctgcaggtgccgaaagtcttctcgatgacggacgtcaacctgcagatccccaagggccagcttgtcgccgtcgttggcagcgtcggctcgggcaagtcgagtctcgtccagggcctgattggcgagatgaagcggacggccggctccgtcactttctcggaccgcttgggctatgcgcctcagcaggcctggattcagaacggtccggcgcgaccctcccgccttctgtcacacgggcgagagctgactctctacacgcgcctcgcagccactatccgcgacaatattctctttggccagccatacgacgaggaaaagtactggaacgtcatagcagccgcctgtctcgagccagacctcaaggttctccaggccggcgacctgacgtccatcggcgagcgcggcatcaacctcagcggcggccagcggcagcgcgtttcggtcgcccgcctgctctactctgacgcgccgatcgtctttctcgacgacccgctaagcgcggttgacgcccatgtcggcaagtctctattctttggcgccatccagggtgcactcgccggcaggacgcgagtgctcgtcaccaatgcccttcatttcctgccctctgtcgatttggtgcgttctttcaacctcggccgctaccgcttgacgtcctgtggctgacgcaagctggtgcgcgctccaggtcatcatcattgacaacggccggatcgtcgagcagggaacttacgaggagctcattgcatccgagggcgagctgacgcggctcatgcgcgactttggcaacgtcgaggaagaagaggaggaactcgaggaagaggaggttgcgattgaggacgccgctgccgtggccgacgagcaggcccgtctgaagggcatcgaccgcgccgagatgacggtcaagcctggcgagcgggcgcagctgctcatgagcaaggaggagcaggccaccggtgcgtcctgcctgcggctgagcagtacacgctccgactgactgaccgcctcattcgcgttgcactctgaacaggctcggtcggtttccaggtcttcaagcagtacttccaggccggccgcggcatcatcctcatcccgatgatcatcctcatggtctgcctctcccaggtggcgaccgtcatgaccagctacgtcctcatctggtggtccgaataccggttcggtcgcggcaatagtctctacatgggcctctacggcgcgctcgccgtcgcccaagccctcttcaccttccttctcggcgccgtcctcgctatgtgcaccttctgggcctccgtcacgctccaccggctcgcggtcaaggcggttttgcgtgcgccgcagtccttctttgacgtgcgttcgttcctgctcttcgatagcgtcaacctgttgctgatccttcctcggctcgtcctcgtagacgacccccttgggcagaatccaaaaccggtgcgctccgccccgactgtgtcgggcctccggccgccgccagacatcccggctgacgctcgcttgcctacccggtcagcttcggcaaggacatggacaatctcgacaacatgctgccagacggcctccgcatgctaatttcgactctatcgcagatcttgggcagcgtcatactcattgccgtcatccagcccatctttctcgtcgcggctgtcgttgtctttttcctcatctacaaggctgctggtaggttcctcgtgcttcgtccgttgtctgccgaatcgcactgacgatgcgcccctggctcagccctctaccgtatgtcggctcgcgagctccgccggaaccagaacgtccttcggagcagcgtcttcagcacctttggagagagtctctcggggctatcgacccttcgggcttacggccgccttccgaacgtcctctctctcaactaccgccaagtcgaccatgaaaagtgcgtttaaattatcacgcatactgctcgcagagtgaacgctaacttgatcttactaatcgcagtcgcgcgtactacatgtgagaagggcctgatttgcaactcgtcgctttgcgccgctctgacgacgtcctctacccttcaggaccatcttgacccagcggcatctcggcatccgactcgacttcctcggcaatctcctcgtcttcacctgcgccatcattgccatcactgtccactcgctctcgcccgccgaggtcggcctcgcgatcggctacggtgcgtctgcacccggcccaatcgaagcgcgctcccaactgaccggcttcctcctgcctttgtagtcatcggcattgtccagagtctggcctggctcgtccggcaagtggccgaggtcgagaacgactctacgtcggccgagcgggtgtgcccttccttctcttcttcacttacgatgccggggggctgctgatcacgggagcggctccctcatcgcaggtccttcactacgcgaacaaactcgagcccgaggcgccagccgacatcactgagacaacaccgccagccgagtggccttcagagggtcgcatctcgttcgacaagtgcgtcgaccacgtctgatcgctcgcctgcctcgtgcgccgtcgacgctgattgccctcctgcacgtctgatcactcaggatcttcatgtcctaccggcccgggctgccgaacgtcctcaagggcctcagtctcgagatcgacgcggcggagaaggtaggaagtgagttggctggctgtcgtactagcacctaggtacccgtcacccacgtcctgactcgaatggcgggtcttccctgcagtcgttggccggactggcgccggcaaatcaaccatcatgaacacgctcttccgcttgcaagagctcaacgcaggctcaatcaaagtcgatggtatcgacatcgccactctcggcctgacggctctccggagcagcctggctatcctcccgcaaggtgcgctcccccctgctctgccaaaaaagcaggagtccgagctgatgttatttttgcagagccgacgctcttgtccggaacgatccggacaaagtgagcagctcgcggaggatcttctcccctcaatgccgctactgacgccttcatgacaccctcccctttccctagcctcgaccccttcggcatctacgacgacgcccgcctgaacgacgcgctcaagcgagcctacctgaccgagctcgatccagcgacgggccaggcgaagttttcgctcgacagcccgctcgaggacgagggctctaacctttcggtcggcgagcgctcgctcgtctcgctcgcccgggcgctcgcgcgggatgcgaagatcattgtccttgacgaggcgacagcatcggtcgatctcgagacagacgccaagatacaagagacgatccgggtcgagttcaaggacaagacgcttctaacgatcggtgagtgtgtcggctccggatcctcggtccccccccccgtcccccggagctgacgccggcctccccttccacagcgcaccgactgcggacgatcctctcgtacgaccgcatagccgtaatggaccgaggcctcgtcgttgagtacgactcgccgctagcgcttttcgagcaggccgacggcatctttcgctcaatgtgcgaccgctcggccatcacccaagacgaggtgcaggccgccgccgagctacgcgacgcgcaacggtgacccaggccgctctagatatcgccatgcattctcccgtcacgcatcgttggccgtcagcagcgtcccgtgggacatagcgggctcgcgtgcggcgggatggccagagcgccgacgtcgccagcttgaagccacgcgccgggagcgcgacgagggcgtgtaggttaagagggcgggcccttgatgcgttcgcggaaattcagttgccggccgaaacttgaattgtcaggtcgtcactttgcgctaggcacgccgacagtgaagacactgtgcgcaacgggacgatcgtgagcggcggttaggaacagtggcgggccgggtagaaagtcgccgctggctgagacggacctgaagagggcaaagcagccatagaggagcccgaccgggtaggcgacgaggaagcgctggtccgacatgcgcaggacggcgacaaagatggacgaggccgcgtgcgtgcaccagaggatcgagacgagcgagaacatgtagccgagcggccggctgcaagggaggaggagcaagttagtcagacaagctcaagtgcgacgaccagtttcggccgggtcgagagaggacgcactccatgccgacacccattccgagcgtgccgagaccgaccattgggagcaggcaatagccgaggacggacgccgtccggtaggcgtcgatccctcggacgctcatcatgttgagaagtgtgtacatgaagatggtcccgaggacggcgattgcgtagatgtacgagaactgtgacttgccagactggtgcgaggggccggtgcgccacggtcagcatcccttgggcagactagtgctgagcagacacctctgagcagacgtacaaagaggaggaccatgccgaagcaaaaacaaaagaggactggcccggcaaggtcggcgtcgtccatgatacgctcgtccggctttgacagcgggttgaggacggtgagcgacttggcgacaatgtgcgagaagttgatgccgagctctacgagaaaggcagataaaggtcagcgtcctgacgcttttgctgaaggccctgcgaggtccggcgacgcaccctcgagcaacggcggctcgccctcgaagccgctcgttccgaacgcctcccaccatctcccttcgccctggagccggccgctggcgattccgctgccgccgctcatcgagcccatgctcccactgacggcctcgcctccaccgtagccgccataagcgcccgaagagccgacaccgccagcgggggcgccgaagaaagcgaggtcgggcgcctgctgggcgtgcgggtaggccgacgtcgtgtaggcctgcgactggccgccgtagccgctctggttcgggaagaggtgcgacatggagctcgaggcaggtgtaatggaacggccttctaggtcgggttggggtcgagctgcaaggggaccaagggaaaagtgggggtccttgatgagagtgaggtacagagggcagcggcagaggtctctcttgccagctcgcctcgctccgacccgagcttcggaggcagacatttgaacgagcgggtcgacgaccgcctcagccggcaagcgacagatccctcactcccatcccatccgtgcaggtcgatagctcgagctcctccgacggccaatgtcgacccccgctcagaagaagcgcaaaaaggcggccaaggtggccttgcccgccctgccggcgtcctcgacctcggctccgctcgctgcgaccgcgccggccaccaccagggctgcccccctcagcgctatcgccgcccgccgtgctgctgccgctctgatagctgcagcatcgcggcctccgacgccgccgtctgcgccaatcgaggagccagagctcgagcgcgacctccaggaggacgaggaccgccgggcgcgcgcgctcatcgccgacgccgccgtcgacgacgacgatgacagccgagggggcctcgccgctgaccacattgtgtctggcgaagaggacgagtcgtcggacgcgtacggctcctccgagggcgaaggtgaggatatcacgctccagatggacggcgaggtcatctcgctcggctcggtccctcggccgagcaggccaacgtcgcgccggaaggccaagccgaccaagggcaaaggccgcgaaggccgcatctcgcagctcgatgtgctggacgggagcgagacgctcggggagtcgagggccaggaaccagagcatggaggtcgacacgcctcagaggtcggcatacggcgcgtctaacagcgggacgccgtcggtcgccgacagtcgggtgcccaagaagcgcaagggctaccagtgcgtcgtcctgagcacctctcctgaggcccccttttgccggccttaacccctgagtgacaatgcgctgctacgccaggtcctcgtcaagctatcagggcgccatgtcagcctttcttccgaccctcggccagaacgtcctgcgcctggacgcagatcgcctgaaggatgtcttcagcgacgtgcaggacggcgagactgcttgcgtcgtcctgctgaaggccgacgaggtgcgacacttttgcgatcctgccaaagacttcagacgctgaccggagtcgacccgccgcagactgttgtcttctcaggctcttgtgcgctttacccgctgctctcgtccgtctcagtcttcggcgccgtcctccctccgacgacaacctcgccgccgacaagccactcgatctacgcgccgatctcgcaccctttgccggttgtcacgccagcccacggctcctcggctccttcgccctacgtctccttgctcggcctcgacccggagacgctctcgggctacgcctgcgtcttcctcgtccgcgagcgtcgctcgggtctcgaatgcatgtgccgggccgtcggcggtctcttcgatggagtctgggagggggagacggcaggttggggcgtcaggggattcttcccggttcgtcactggccaccgtaagcgtcgattcggtctaagactgacatccgagctcctgtttcctggccggcagatcctctcgcaaacctccttcacggcctacacgatgccgccgacctggcagtcggccctcgctgcagctatccctctgcctgccgaggagccctctgcaccgaccgcgggatcgacgtacgaaatcgtgcccgattcgccctcgtcctcgacagcctcgcttccctcgccctcctccgaggccgaggacgactcgtacggccccttcactgctttgctcaaagggccgaagcgatccggcaagtccggcatgagcagggcactcgtcaaccggctcctgggcaagtacaagaaggtagcttacctcgaaaccgaccttggccagagcgagtttgggcccgaaggtgtcgtctcgctcgtcatcctcgagcaacccttgctaggtgcgtgtcgttgcgacgtcgaccttgggaaacggaggctgacgctccgttcgctgcaggcccgtccttcacgcacccggcgattccgttccgcgcgcactacttcggctcgtcgacgccgcgcaatgacccaagtcgctaccttgcgctcgtcaacgacctcctgtcggcctaccggctctccgttcaatatccgccttacgcatcgacgtacggcgcctcgcaggtggcctcgacctcgaccgatattcgcaacgctgccgtcgtcccgctcgtcatcaacacgcaaggctggttcaagggtctcggtatggacctgctcgtccggatcgaacaagaggccgaggtcacagacgtcttcgagtttgaggctgcctctggcgggccaggcgacgagtgggaggacggcggctgggaggccagcattccgctcgaaggcggctggggccggatctgggccgagaacgacggcgccatggacgacccctaccggcaaagctcaagagccggcccgcgccgccacttcctctcgcccgttggcggcacgccgctcgccgcccgatggacggcgtctgacctgcgactcttgtcgctcatcacctacttccacgctcagttcccggcgcctaccacagcggactccatggccgccgacgcctcgccactcgcagagtcatggcattttgaccttccactcgtcgcccatcggccgtgggccgtcgactggaccaaagcgttcagcgcgatctacctcgctggcgccggcgccgaggatatcgtgccctcgctcatctgggacgcactctcaatcagcctcgtcgctctcgtcgcgccagacgacgactcgcccgtcgcaggccggccgaccgacttccgctcggcagtgccgtacgagcagggccggccgccacccgacccggcatcctcgcgctgtcttggcctcgccattgtgcgcgccacgccgggcctcgcaccgccgcacgaccagacagtccacctcgtgacgccctgtccggcgcggctgctctcgcaagcgacccttctcgtcaagggcgagactgagcttcccttggcggcgatgctcgactggcgggtcgacgctgacttcatcggcggggtcggcggcgtcgagcgcgagaacgtgccgttcatcgagtgggtcggcaaggatggcggcgtcggcgtcatcggcggcggtcgacgcaaggtccggcgcaacgtcggccggcggcaaggctgatgaatatggccacggcgcccaccaccgacgcgcgagagtacagcattaggggggatggggatcggaagctaagggcgacagttggttggagtgggccggctctatttgagaagctcgagctcgcagtactcgggcgtccacatgaacgactcgatccagctgcgaagctcgtggttgttcttgccgtcggggatgccctcggccgtcgcgacaccgtcctccagcgcctggcggaccatggccatcgcaacgttgacggtgacgttgcggatcgtaccgaggttcgggaggagggcgccgtgcgggtcgtcgacgagcggcgagaggtcggcgagggccttgacgccggcgaggatgaggctgtctgagagcgacttggcgccgctgatgatggtcgcgaagccgaggcaagggtagcagagggcgttgttggcctcgccgatctcgatcgtcttgccgtcgaactcgaccggctcgaacggtgagcctgtagcgacgtgacagacgttatttgaccacttgatgatgtcgtccggtgtggcctcctcgagccgggtcgggttcgagagcgggaggaagacggcctttttatcgcctgcggcctcaaccatcgtcttgacgagctcctcggtccacgagcccttctgggccgacgtgccgataatgacggtcggcttggcctgcttgacgacgtccattaggcaaaacttgccgtcgtccttccactccttgacgtcgtcgcgggaccgggcgtaggccttctggtgctctgtcagatcctcgtcgtcgtcaaacaggaggccctgcttgtcgatcagccagaagagcttcttggcctcggcctcgtcgagaccgtcgagctcgcaaagcgcgcggacgacccactcggcgatgcccatgccggccgtaccggcgccgtggacaaggaagacctggtccttgagttgtgcgtcctgggcctttatcgaggcgagcagcgaggcgaggacgacgcagccggtgccctgaatgtcatcgttgaaacacgggacgtcgggccggtacttatcgaggatacgggcagcgttctcgcggccaaagtcctcaaagtggacaaacacgcccggccagaggctctgcgttgccttgacgaacgcatcgacaaatccatcatagcgcggaccgctgtgcgtacgcttctcgcgcaggccgaggtagagctcgtcgttcagcaggtcctcgttgtcggtgccgacgtcgaggacgaccgaaagcacgcgcgacgggtcgacgccggcgccggcgctgtagacctcggacttgccgatgcagatggcaacgctaggaaacgaggaagggatatcaatagggtcagcacgtgtttaacggccagcgccgaagcaggacgggcacgcaccctccgacaccctggtcgccgatgccaagaatttggcctgacgaggtcgattgaggggcgtcagcggtctgacgagagaacgactgctgcagaggactgaccggcatcagtgacgacgacgaggtcaaagtcgcgcttgccgtccggcaggctgccgggaggggcgcgatgcgtcgcgagcagccgctcgatgccctccgggtaagcctcgttaaagtcggaaatggtcaaataggcgccctctggccggcggaataggctgctccatttttcgatggcctcgctaacggtgggggtgtagaggatgggcagcaaggtcgggagatggtctagaacgaggcgatagaagagggtctgttgacgctcggggtcagtgacgcgtgcgcgacgctcgccacaggccgatcggaagacgtacctcgttctgctcgcggagcgaggcgagaaaggtgtgcttggagaggtcgtctggcttctgctcgagctggtgaagagcccgcttgacctggagctcgagcgagtggatggccgacggcaggtgggcgacgagctcgaaacgctcgcgctcctcgcgtgtgaaggcggagccctaggatcgtcggcaggcatgacacgtcagtccgaggcttgcccgcaagagacggagagacggcagactgcaagcgacgtaccttgttgaggcgcgggtcctgtcatcgtggcaaggcgcatcgtcaacgggggaagacgaaggggagaagctgcgggcgaggccggggacggccgaacctggagcagggcagcgcccttgagcttggtcttttggactctggagggcttggccgacattggcggggcagacagcaaagatagcaggggagaggcgacaggcaaggcagcaggtgcgagctttgagatggacgtcctgggaagggaggtggctgcaccttcacctgccttctgttgacgaagggctgcgcagctcgaaatctcgatgacgccctcggcgacccgttcgtccatccctcatccctgccccgtccagtacgttatctaaaaggagggtctcgcaggtcggtcgtgaaggtcagaggtaccgctgtcatgcccagggatcgatatgtgcatgctgcaagcggacgtcgtcgatcctacgcgtcttcgcgtctccggcctgacattcggggtggcgaggttggcgtcgatcgcctgcgaaatcgtagtacaacacatccaccggagtagtcaaggcctaggcatgcacctctcaacgctcgctcgtgatgaagggtgcatgggggtcattcgaaattgacaatccatctacggcaagacagtcccgaccaacctcgactctgggcctcggtaaaactcgtcgacgagcacgctcacttgctcgccctggccgtacgtcttgccttttgggtagtgtgcctcgatcttcagcccaaggtctgcaatggcgacgatgacggtccgcgagagcggcgagagcgggacgacgttgctccggacgatagtggcgtctgtgaagggcccgaggcgggccgtcgggagggcgggcgcgcgcgtgaaagggtaggcgtggatcggcgggtggacgttggatgcgcaagcggcgagggttgagggcttgcgagcgtgccgctcgagcgcgtagacaccccagaaggcgcgcgagcggtcggatgcatgcttgacgagctccgacgtcagctcgacggacgttgcccagtcgaggacctcggctcggctgaagagcgtcgacgagcgcggtgtctgagcgttcgggacggcggccgagctcgcagcgggtgcttcggcaaggagggcgtgcttgatctgccaatgggcgatgatgtcgccgtagcgtctcaaaggcgacgtgacgcggacgtagcctccctcggcagccgtgatgcccatcgcccagtgcgtctcgggctcgagcgagactcgcccggcttggaggatgacgccgagccggtccatctcgagcgggtcgacctggcccgactctggatcgcgcgacgcaagcagccgctcaagcccctcgcgcgtcttcgagacggccgcggggctgtggcggtaggcggtcgggagctcgcggtcgcggaagaagcgtccggcgacgttgccggcgagcgtcatgcacgacgcgacgagctgttgcgactcgctccgcccgccgacagaggccgaagtcacgcgataggcgacaaagggcgcgccgttgctgaagactggcgtcggcgtcgggtcgaacggcagacacgaaagtgggctcggcgagaccttaacctggtagtcggccgactgccagctgatggcgccggcggtgaatcgccggcggtggatcgccctcgcgacctgctggaggagctcgatgtcggccatccactcgggcttgaacgcccgcggcttcgtcgcctcgaactgagccggcggtcttccgatcggccattgtgcttcggccggctggcagccgagcgccgtgttgaccgcctggtagctcgtgacatggacgttgcggatgatgcccgcccggaccttgtagtcgattatctcgcccgtcgcgaggtcgagcagggctgagaacgacagcgcctcctggccccgaacggggtcgacgacgccgccctttccgccgagcgagaaacggtcgagcgtgagcgagtcgggcaggagcgggtagttgccctcgggaaggtaggctgtcgaggcctttgcgagcgccaaggccgccagccggtggccagggtggaggagcgtcgtcgggtcggcgatgtgcgtgtggacccagacgcgaccggcgtcgccgtcgcagcgctcgaccgagacgccgtcgtcgagctcggccgcgtccgggtcgtcgatgacaaacacgttgagctgaccaaagtcgtgccgaaggtggtcgagctggtccgacgggtagaggtcgtctgggccgaggacggccgtcgacgacgacggaagcgtcgagaccgattgcatcggctctggcgacttggacgctgccgctgcctcgctgctctcgggccctcgcacctcggcccggcgctcgcccttgacaaactcgagcgtgctcccgagcgcggcccagttgtcccagggcgcgcggacgcccatctcgacgaggaagcgagcggtgcactcctcatcaaagacctcgccatagcgctcggtccgcttgacgatccacggcaccgtctgcgaaaacggactgaactggcggtccgagacgaggaaggaggcttggatgtgccggaggatgacgaggtctgttgcggagaacgtcggcagcgacgggttggcgggctggagtcgcggcagcgcttcgtcatccgtctcttccggcgttggggcgtcaagcgtcggccgggagtgatcgatgaggatctgggcttttttgacaaagctgagcacatctggcgacctgtgacgacgaaggaatggagggaggctgctggtcagagtcgcgtgcaggaaggcggaagagggaccgcaggggggcactgactgctgctcaatcatggaccggacggccgccatctcggtcacctcctggtggctgcggacgcgccagcgggtggcgttccagggcgcgcgcccgctctcgcagatgtaccggtccgaccgggcgagcaggtgcttctggatggcgaagcggagaatctcctcgcgccgcgcccagtcatcgacggtacgggcgggcatagcctcgcgcttgagggcatcagagtccttctcgaggacccactgagcgacgtctccgaacgcgacgagcgcccgctcatccgcgaccttcgaacggaaatgctcccaggcggagagcatatacgtctcgaccgcgccccgaaactcgccctcggctcgggtcacttggcggagcagccggattgccgctcgccgagcggcgtgattctggattgagcagagccggatcgagtcctgtgggccagcattggcggcgagtgattcgggcaggcggtgggccgcgaacgcatgcgtgatggccttcagcggctcgtagatgacctcgcccgaaatgagtagcagacggagctcgacccgctgcagtagcacggtgtcaagcacaactgccgagccagagtaggtcttgccgctacagggagtgagcgaggagtcagtaggaggatggcactggagcgaagcggccgggcgtacgcactcgacaaagacgagcgtgcccttcttgaaggcggcgacgttgccagagctaggggtcgtcgcgctctcccgacgctctaccgcctcggccagcagctcagccttccggtcgagccagtcgctgctcgagatgagcggcgctttgaacgcatcagcctcgcgagccgcagcctcggcgtcgagcagggcatgctcgcgaccgctcgcgccgtacgttgcctcggcgtcggcgtcggcgcttccacagatgagggccatcgacgactcgagcgccagcccgtcgctcgcaaccgccgtaaacgtctcggccatgtgccggagcttgtcaacacgctcgcgctgctgctgaagcgccaatttctgctgttcctcgcgacgctgggcccaaagctcgtggcgctgggcttggagctgctgggccgtcacgtcttccctgacccccaccggccggccgacctcgcgacgcctctcaaaaacgggcgcctccgtctcgagcgacggctggaccttcaaaggcaccaccgtcttgacgggcgtcgcctctttggcgacgggcgcctccttcttgacaggcgctgagttcgggatgggtgccgccttcttgacgggcgctgccctcttgataggtgccgccttcttgacaggtgccgccgccatggcaagcacggccctcttgctcggtgcgaccttcttgacggatatggtccccttcaaaatagtcgaggttgccaccttcttggccttcgcgagagccggggacgaggcgaacgaccgagcgccgtcgctgcagcacgttgctgcacggcccgagctcggtccggcgagggccgaaacgtggtgggaggccgagctgcggcccaaggccagcgtccgtgtgccctgcatcggcaagagggaaagaggaagaggaggctcgtcggtcggtcagtcggtcggtcgtggttgagaggcaagctccgtcctccgccacagcagcagcaacagcgcgcgctcgatcgcttctcgcagcccaaaaccgagacgagcctcggagcgagcgcagtttcactcgccaagcaccgaccctctcccctctagccgttcagcagccatgtttaagcgactgtccaagaagcgtgaccgcgaggcgatcgacgaggcctcgggcctgaccgagctcaagaacatgcttgccctcggcggcgaggacgaggtcagcggcgagtcggagagcgagtcggatgacagcgacgccagcggcgacgagagtgcgtacctctcgcagggagctcgcttaagcaagggcagtgaacgctaggctgatctgcgcacccaacctttccaggcgacgagggcccatctggctcggacactgacgagcaggatgtcgacggctccggggacgaggacgatgccgagggctcggacgctgagggctctgagatcggctcggcttacgacagtatgtccgatcagagggagctggtcatagcgcctgagctgaccctgttcatgcagccccgattccagtgccgctggccgaggtcccggacgcaccgctctaccccttcccgtccgagaacgacaagtcgtccgacgcctggcagctctgcgtgttgtgcccgaccaagctgctcaagaacaaggacatggcgacgacccacctgacgtcgaaggttggtcgctctcgtctctgggccgcaagccgctcgttgctccccgctgacttccgttgcatcgttgcctcccgtccgccaggtgcacacgcgtagtcttgcccgcttccaggcgttcctcgccgagaacccgcaggacgaggatgccgacccgcgattgattgtcgacctgctgctcgacaatatgaacgagtctgcccggaaggccgacgaggaggctgaggagcgcgtgcgtccttctgctcccgcctcagaggcgccagcgctgccgtgctgacctctcctcggcgtcgctccctctcctgcgagcagaaggccgcgcggaaaacaaaggcgagcgcggccaagcttgcccggctcgagaagaaggccaagaaggcggccgagcccaaggtcgaagaggacgcggtccccgcaccgaaaccgccggcagtggaggagaagccggcgggcggcgagaagaagggcggcaagaaggagaagctgagccgcaaggagaagaagcggctcaacaaggagaaggcggccgcagctggcgaggaggccaaggtgtgtctctttcccgatgtgtcgtaggaagacgcccccgccgactgacggctgcttcgagcttttacaggccgacccgccagctccgtccgcccccgctgccgctgttgaggccgttccttcgccgccgcgcaagaaggccaagaaggcgcgtgcgagccttggatccgagccagcctcggcaccagccgctgcagcagcgccggcgccgtcaggaaagaaggccaagcgcaagagcgtcggctgatgacattcttgtcgctggtacggcacgagacggccatcgagatcccgaacgaaagcgaccaaaaaagggcggcatggcggggggacttaagaggagcaatgtgaggctgcagacggatgtgaaagcgttgcggcaccgtactgcgtccggcccagaatcgaggagtcgagggagttgcgaggaggcgagccagacagtggagggcgctaagggctacatgaagggggaacgttgcgggggaggataagaaaaggagatgcgagagcgcgttgactctgtgggtggcttcccagagggcgaagccggttttgtgtgcgtcaaagggagcaggagcaggggcagatgaggagcgaaaaaggagggccggaaatggtgagcggcgaccgatcaagtgttcttgacgtagctacgagcagcggcgtgcggagggtgggtcgaagcaaggtcagcgacagtgccgcaagcgagaggtcaacaagaggtcgctcgacgtacacgcgctcaaagctgtcgcgcgcgatccagtgctcccagaagcggcgcgtcttcttgccgatgcggaacggacggcgggcgtcgtcccgctcgcacgcgccctctgctgctccgttgctgttgccactgtcgtcgcccgccgccggcgtcgccgtgtgcccggtgccgcccggggcaccctcagcaccgcccgagacgccgatgccgacaccgctgccggcgatctggtcttcgactgcgcggaggcccgaggcagtcgccgtgccctgcgagagaaagacgacgcgcgagagccaggcaatgatgtgcaggtcggcgagcgactgcgccgggtaagcagagtatcagcgacggtgtctggcctcaagtgcaggtttgacgcacgacgtggtcgccgagtgcgagcgggccgaccatctcgtgctcgagcgtcgtcaagacgtcgacgacgccgacctcccacgccttcttcgacgctgcaaaaaatgccttgcgccggtcctcggtctcggcgcccttatgcggcgagtagctgcgtcaggaagagggggggaaaggggtcagtctcgccaacagctgtccggcgagcggtcgaaagcgcgcactagacgtcgtagacgaccgagttgacgacgagctctgcaggcgggcgaagcattcatcagccgactcgcccgccgccagacggaagcgtcgcgacccactcttctcgaggaaccggcgcgctggcgagtcgtcctcggcctggtcgcgaaaccggagaagcgcctcctgcctgagccgcacccactcgcctgcaaagccgcgctccttggtgacgagctcgtgcggcgtccgggcgcagagcaggaggaaatttgggtcggccgacggcaggtggactgcgagcgtcagcgtatccgacaggtgcttgccctcgatcgtcgctggcgagagaatcggcgccggtgcggaaccgggctccgatgcagcagacgttcttgacgagtcgaggaaggtgaggatcgactacccgaggacgagaaagaaaggtcagatctgcagtatcgagcgacgccagtgagatctgacgcgcacaatcgtgtcctggaacgatttgaagcgcggctggcgggcgaccgtctcgaggacgggcacgacgagggttggaatcgtcccgtgcgggttgatcttgaggtactcggggctgcaccgagagcgggggcgtcagcgcgagattcagccacgagacaagcaccgccgacgtacctgaagttgtcgccctttgagatgtcgacctgggattttagggttggaagcatcgggcgagggcgggtcagtcttccgccttatggctgtcgcggccggcggccgagagctcgcgcaggaacggcccgcacctccaccaggtcaaacgcgcggtcgtcatagcccttttcgcagagggcgagccgcggaacggtcgaccagacgctcgtcggattcctgctcagcgcgagcatcgtccgtggggaaagggagcgaagcgggttcgaccagacacaagatcggcggtgagcgacgagacgcgcagcggcggaaacaatccgggtcgtcatcagcctgagttgacgagcgcttttgcgaggacaaagagggaccgcaccagtagaggacggccttcggaagggacgggtcgcccgcttcgagggcctgcggctgggaaggccgctcggccggatgctcatcgacggtcatggcgagagatagaggcggcgggagcagtggcgtcggtcgagagtcggtgggagcccgccggccgaggaggcgatcgctcgctcgggaacgtatgggcgaggcttgagctgagagcgagagagagtggcctgacggcgaggtcagaggctgtgacgatgctgacaaggctgctgccggtctctcgccgaagcgaagcagagccgggagcagagggatccggcgcaccgggtcggccctcagaggctggatgggctggatgggcgtctggcgcttgctttggatggggagaggaggaggcggcgctgcgaggagtggggtgggtcggtaggcgagaggatcagatggtggtgatcgggcgagaaaaggcgagaaggccaaggggcgagcgagatggacgaggagcagctgctttggagcgccgccgctctctcgcgtggcgtttctgcgacgacccggcaggccggtcccctcgatagattccttagcagcctcgccgcagcaggacacagagggcgcgcgctcgggcctcgtgcttcctccaatttctcgcgtctgacctgtctgcgagaaaggagggagcaggaaggacagcagggtaggatagggcagctgtcgctcgccggtcggaaggcgcatccgtctgcgtctactgcgcggtaggtcatcttgctctcttcctcgctctcgaaggtgctcgtctcgcgcatacgtgcggtcgtcatttgacagggtcatcatatgagagcaacctcggtgatgcggtcgagcgactgctaacttttggactgatctcggctcgtcggctaccagcggcatctagacgcggagaggagaggatgagtgtaatcttcctgactttcggccgtcgccctgcgcaggctagcacttcctgttggtcgacctggccgacgagacccttctggacggcagcagccttgcgcactgtttcagcaccgttaagcaccggatctggacagacgtttggtcggagatgccaaaaaggcgacgagcgaggccggcggcggtggtccgcattactggggccgagttcacaagggtacgagcgccgggagtccaatatgttcggctgcaggtcgaaagcttgccgcgacagaagcgatggttgtcggccgccaacaagactgcatgcacgaagggtcctctgtcagagcaaggtgctgtttgcgctggcgatggtgcggccgaccgcgccgctcaagactcgtcagcctttggtcgcccagatgacgagcatgacagtctgatcctccgccggccgcttcagaatcgtcccgtgttcctctgtcgcgcacgaggcatgaccgagcgactcttcgtagacgtcttggaagccgtgcgccctcaggagagctgggagggagacggagagaggtgtgctgaccgagccgacgcctgagcgcgcgaggtacgaccgggcgaggttccggacctgcaagcggccattggagggtgtcagtcagctccagcgaagggacaacgtgttgagcagaaggcaccagtaggccctgggcgccgcccttcgccgctccggccggcgcagcgttccggccctcgacaaagacgacgagcccgcgaggcctcaggcagcgagcagcctccccgacgaaggcaacgagcgcgccctctccgctgagcgaggagaggagcttgcgggcgtggatgaggtcgaccgagtcgcttccaaaggggagctgggccgccggctgggcatggtacgtgatgctgaccgcgagcgaggatggccgaggcagggggtctggcgggagcagtgacatcagctgaggttctgggagggcgcgctctgcaagcctttgcacctagagcgtgcagctgagcttctgggtagatggccaagagcttgagcaacctgtacggccgagacggaagcatcagcgccgggagggtcaggtcaagcgtcctcatcagcgagctcaccaggagcactgctcgggccgaacaatagcggttagccaagcgacctggaagacccgacgagctagagagctgggcgcacgtctccagccccgacatcaagcacgacgggcggcggctgctcggctggtccgcggctgtcgtcttcgccgctgccgtggttcatgcttccgatgaggatcagcctggccgcgacgtcgaacccctggaaacgactcgcccggtcagtcagtctgcggcatgagccgcctttacagcagctaacgcaccatgcaagccagccgctgacggggaaatgagatcggatgatggcggtccagaggaagtctttgcggtcgtctgtccggcggccgctctccctccgtcggccgggcaggtgctgcgcgcggcagccgtccccgcctcttctgtccttcctttgaggcgacacgggcaacgcagcatgctcgcacggacatggcataggttgatgagaggcagggagagcggcaaatatgctacagggagagaaagaggggttgggcgaggaggctacagcgggttggagcgccgttgaggcgcgcgaggatcaggcccccgctgcctcaacggcggggtcctccctcgtccttctcgtcatagctgtcatccacagcccccagcagcatcttgacaagccagagctcaggcgtaactgcggttggggataagcaggaggggtctcagtagtgctctggctcgtcccggagcgccttgaacgagactcacggtcgatgccggccttgcgcttcatctcgtcagcctcgctctcgtagttgctcgtgcctgcatagagggggtcaagtgacggtcgttagcgtcgcatacctcaggcgtgcctaggagatgctgcgaaatactcaaaatcaacgaggccgccgacctgagggtgcgagtcgatctcgccaaggaagtcccttgccttcaaatcgttgccaacctgagcaaactggtagctgacggcgtcggcgccgtagcgggtccgaccgagctcgttgttggcgttgatgatcgaccggaagacctggtcgcggggctcgccggcaggcgttccgtcggtctgcaagaagaccgttgtcgcaagttagagaagggcacggaagggcgacgtccgctggcggacgcacgatcgtgatgacgaggaccggcttctggagccggccggcgcgcgcggggccgaggatgagcggctggaggaccttgttgtcgagcgcggtgccgagcggggtgaggccgctgaagcggacctggtcgacgagcttgacagcctcctgctcggtccggatgccgttggcctcggtctgcgagttgaggaagcggacctggatgccgtccgagtcaaacttggacgtcgcataggcgacccggccgaggatgagcttgaggtcgtcgatgcgctcgccgccctcctcgaaactgccagtcgagaagaaggtgcgtcaggaacggcggactcgtgcggcatgcagcgcgagagacgcacgccatcgaacccgagtcgtcaatcaggaggaccgtgtcgaagagggcaagcttgatgacgtccatcgcgatctctttgtcgattttccaggccgagacaatctcgtcaacggcgccgctctgttgaaacgacgaaggtcagctttcatctctcgcgcgcaggtcacgggtagattcgaccgacctgagcgatgcgctgggcgatggggccgagggacccaggcgggtagaaagcggcgagcttctgctccacgacgcaaccctggaggacctgttcgaccattcgcgggtcaagagcctggccaggcgcagcctggctggtgggaggagctccctgctgctggccctgaggctgctggctgtactggccggaagggggagcgccagcaggagcaccgtacgactggccgccctgctgctgctggggcggctggccgtactggccctgctgctgcggaggctgaccatactgctgctggccctgctggccgtaagcgccgctcgctgggggctggccggcgggagcgccgtactggctgcaagttggcggcacacagcgtcagttcgcggcgttgagatggaaggcggacaccaagaactcacccctgctgctgaggaggctggccggagggagcgctggtggaccacggaggcaagcagggtcagtcttcaccggccatcgcttcgccaagcctcgtccccgctgacgggcggagcaggagcccactgacccgtagctcggctgaggcgtgtgctggcccggccggtctcccgggattggaggcgggccgctcggcgcaccgtacgagggcggaggctgaccgtactggccctgctgctgctgctgctggggaggaggagcgccgtactggccgccctgctggggctgctgctgctgaggcgggggcgcgtagccaccctgctgagcgggaggagcgccgccggcggcagcctgggaagcagcaagtttcgaagcgagacctgaggatggttgtaggcaagaaggcgagcggttagccgtttcgagaggcggcgattgtcaggcgagatgggcggtggaggaagcaggtgagatggagagacgggcgctcgtcagccagcgcatccttcgtctagccgtaaactcgccagtgccgaagggatctgacgcacccattgtgtgtatgagagtatgagctaggttgaggttgatgggaaggaggagggtgtaaggctggttgagaagggtcgttggcgaaggaggtcaagtgtggcgaggaagaggccgggccaaagcgacgagtctcagcggcgggcgccgccgtgcacagaggggacgtcatcgatatatagccttggctgccagcgctgatgccctcgatcaagatcagcccaagtactcgcccagtagcaaagggtcgtcgtcgtgcgcagaacgagctggccacagcctcctgtcggacatgcgaccgctgctggacccgctcgacagctctgcggcggaggtggctctgctctgcggcggcggcaggcgaccgcgcggcggcgcctgactgtctgtgcccagcagagccccttccccgagagtcgacctgcaaggcgagctgagtaacgagcggcctcttgaggcgagcagcatgcgggggggaaaggtcgctggtaccctgtgctggcttctatgcgtcaggataagttggccgaaatgtcgacgtccagctggcagccctgctgcaccgggacttccccgggaacgaccgacagtcgatagttcagggacgagctgaactgctttgaggcggacacgactgactgcaagagtcttttgacattagggccggagagtggcaggtcgacaggcgagggggaggttgccattctcattatattgggcgttccccagttccccagacgtcggtcgaccttgcgtcggctgtcgaaaaccctgctggtcggacaggcagaaaggcgctgcagcctggtaatcagacggccgaatgcccgacaacgccgtccaagccaagagaccatcttcccttgggacgccggcggacgacccggcgcttcccagcgtgcgagggagagccaagcggcggcggcggctgcagcagcagggcgcctctcgtcccccaacccccggcttctctccgcgacgagtcgctcgccagcagcagctggcatcaaggggaggccggccgattctttcgggcgctagcggccgactcggtcgaggctctcgttcgctgtgcggcaatcatgcactgccaaggcggccgcattacttttgtgtggccgtggaaaagctcatctgatcctcccgtttgcttgcctccgtcgggcgactttttcgctgcctgctcccgttccctaaagaagggccctgcaaagctaatcagatcagcccttcacccaccatcctcttctcttcctaccttctctccgaagaatgaacgtcgactcgctcaagtacgacggaccgagccccgcggcggcggccctcgactttggctccatcgacaaggagcaggagcttgacgccgacaagcgctcggccgactttgactcgccccctggctctgcctctggacacgacgacgacagtgtcgagctcaccgccgccgagcgccggacagagcggcgcttcctctggaagctcgaccttcttcttatgacttgggcgtggcttggtgcgttgtgctgcgcatgcctgccgcccattgaaccgctcgctgatgacctctctctcctctccgcccccgaagcctactgcatgaagtttgtccgctttctagtctgctcgacaggcctttggctcaccttgcccttcttccgactctaggatgatcgacggctcgaactacaagacggcctacgtctccggcatgaaggaggacgtgagtctcgttccaagccgccttcaagcaacgcctccgtcggctttgctgaccctcccccttttccccgaagctctctcttttcggcaacgagctgaactacatggagacggtctggcgtgtcggctacgcgctcttcctcattccgtcccagcttgtcctcgccgacggtcgcattccggctcgcgtctggctcccggcttgcgagatcgcctggggtctctgcgtcggcctgatggctgccatgaagagcgcgacgggcatctacgtttgccgcttcttcctcggcgtctttggtgagtcgcttccggaaattgcgccggcattggttccatttctgacggcccggtctcctcctcaacccaattacagaggcttcgtcttacccggtacatccctgttccgctcctcttatccgacagcagagagtcttcgacagcacagtgtcttactgacgctccgctcaccgtgttcaaaccccagggaatcatctcggtcctctgcgagtggtacacgccccaggagattgccgtccgggtcaccatcttctcgacctcgtaccccggagccatgatcttcactgcgttcatgcagtccgcattgtctgccaacgacttcggtcggctcaaggcctggcagtggctcttcgtcttcaacgcgctcatggtgaggaaggtcgatttttgtagtcgctgcggcattgtctaaacctcccctcttctcagaccgtcttcattgccgtcttcggcttctgggtcattcccaacgtgagtactcgcacagatcccgagcagaagggtcgaagactgactcgtttgcttcctttagaacccggttaactgcaacgtccgctggcttaaccaggccgagcaggacattgccaagaagcgcatgcaccgcgtcaagaagctccctccgactgtgcgtcttctcgtgtctcttgatcctctgggctttgctgatccgtgtctatcgaattgccgcttttgcagaagatcaaccgcggcctcttcaagaaggtcttctcgtcctgggtcacctggatctttgtcctcagctactggtgagtttcccgatcttcccgcctcgccgatcatcgtcgctgacccgcgcactcatcctgaagcacgtggacctggtcgcagaacgccaactcgtggattacccttttcctgaaagctgtcaagaacgccgacggcacaaagcgctttaacgtctccgagctcaacgcgattcccatcggcggctgtgagtcttgcgcgacttggcgatccgcctaaacagaactgacggccctcgctcgatcgcagatgtcctgcaaatcatcgtcatgcttgccgtcgcctggctgagtgaccgaaagggctggcgtgcgagcctcgtcatcgtccaggagatcacgctcctcattggcgccatcatcctctcgtgctggccagcttcgttcggcctcaagatgttcgggttctacatactgtatctctcctgcgctgccggaccgtgagttctgcgtcccgttgttgacgcccaaattacagcgctccccaactgatcgcgctttatgctcctcgcagtattctcatcgcctggatggccgaccttacgccgtgcccgtcccagcgggccctcatcctcggcctgacgccgacgtgcagctttgccatcgactcgttcgctaacagtgcgtgtgcctcctcgtgctctaaacctttccaccagcactgacagacatctcctccttctcgcctcgccagtcttcatctaccccgccaagaaggcgcccaactatcccatagggtacaaggccgccgccgcctttgccgccgcctgcatcgtcttcacctcggtcttctggtgggccgacagcaagacgcggccggcgcgcgaggcaaaggccgcggccgaatttgaggctatcacggccgcttcgacgacgagcaccgtcgtcgcgcctctcaacgagaaggtccacgtttgagagctcggaagagaggagtcgggctagactagctttcgaagaaacgatcaatctaatgtccatcacgatttatgatgcggcgagcggcgagtgagacaagacacgcgcagtggagggggcgggagaggacaaacgacgtctgcttcgaccagctacgacccttcgcacttcgcctttgcgcgcatttgcgactcctcgacgatcttgtaagtggtccgggcgtcctgtttgagcagcaggactctgttagcgccctccagccccgccattgcgtccgcgaatgaagaagaagacgtacgcggatgacctcaagcaacagccttccgccacaagcgccctcgccgacgcccgcgtcggccatcttgcccgccaacggcgcccagacgcccgaatggccaaagaagccccggtcgtacgtgttgtccctgccgacagacgtgcgaccccactgctcgagcgcggcagcggccgagccggatgcgggtctagtgccgggaggttcggttccagagccgacgccggggttggccatgatgaggaggcactcgccctcgaaggcgcgaatgaaggcgagtgaagggagcagagcatggtcgtacagcggcgcctggggcgtgtacttgcgctggatcctatcgggaagtgcgtgcatagggcacgtcagtcttcagctgcttcaggtgacgaagtggctcagacgaaggcacgaacgggtcagagtcggtcgagagccagtaagtcggcgcaaagataatttcagccccacgccggacgagcgactggacggcctcggggtgcgataggtcccagcctgcaggcacggaagcatcagtgggcggcttcctggcgtatttgcgccggagacgcacagatgacgagaccggccttgccccaaggcgtgtcaaagacggccgacggctccgaccccggccgcaggtagtctctgcggacgagaagcgcacgtcagcttatgtgttcaagcccgtgtctcgaagggctacaacgaaccgctccgaatgccagaggttagccttcacgtaacgaccgacgatggcaccctcggccgagatgtagtaggccgaattgacgctttcgaagccggcgtcgatcctctcttgcgcgtacgtcgcccactcggcgcgcaggtcaggcgcgaccggctcgagcgtcgggccatcggcggcaaagacgaatggcgaggctggtgagcttaccgatgttcgctcgtcgtcgttgtcgtcgtcgtctgctcgaggtcggtagggctcgactagggtcgtcacgactgcgagtcggtaacgtcgacagagcgcctggagcgcgacgagcaggtgaggcgccgcgagtgcgtacgcctgcgagcgggtcaggcaaccgggcggtaagcagggtcagccggtggagttggtcggaggacgtgcgaacgccaacagggtggtggtggtggtggtggtggtggtggtggtggtggcggccgagtggcgcgaggtgaaagggagggacgccgacggccgggacgtgttccgaccaggcggtgtcgtccccccgcaagcaccttgttcccccgcaacccttcggaggcaagatggaggaacggacagagtggtccgagatgatgccctggaggccatattctggcaggacgcagacgccagcaccctcctcgctcgcccgggcgagctgcctcgctgcctggccgaggttgaaggcggccgaagggaagacgaacggctcggtcgcgcggtccggggcattcgtcgggttgagcgggctcgtttgggcgacgacgaccgggagcgttgcaactgctgcagcttctggtgcgctcattgctgccaaggatgagaggttggtgcttgttgtaaacgcggagaggaggcgatgatggcgtctgttgggttgtcggaggacgaggagttcggagttgggtctcgtcgtcgtcgtcgtgggcccggtggtggcagcgtgggcgaggcggctcggcggctctctcccttcaccgccgccgaaccttggagacggaggcgaaacgggcagtcgatgggctctctggccgacggccgagatcgcctcgccatctgacgctcctcgacagggcacgctcctgcagaccccacccaacacccacccacaacacacgaggcggcaagagagcaagcagcgcgcaaagagggaccaccgcccaccagccccccccccggtctcagcccctggccagccgatgccgccgcaatgtcagcagcagtaggcgcgacacctgcccgcctcaggccctctctcgctcgtttgctctttccttttgcaccgcgaatctcctcatgtaccacaccgcaccagctctcaacccgtcggtgggcttctgtacctctattcagacctggaattccgatggcagcccattttccagcagaacgcgcccttggaccagatgaaaggggcttggatctgcgcccgtttcagcccccgcggcggcgacgagtggcgggcacggcagctccgagcttgccttccctgccgcccacgaccccttcgaccaccacctgccagactgctagcacctcgaccgaccgctctaacctctcacatagagcagcgaatccgtcgtgcagctcgaccgacgacactcgaccgacggccgcaccagctttgcgagccgacggcagcaagccatctcgagccgcgcaagctcccgccaaccagccttcctcttccttgcccggccctggctcgcttccttccaccttgacccgaccttctttacacacacgaagcactgcccgcgttacaaaagccgccgtccgttgtccttcaggcactccgccagctcgacgacccccgccacacgctccagcttgagctcgggcccaaaaagctgggcgccgtcgaacaaaaggacctgcccacggccgtcatggcagctcaggtcgccccgaccgcgatcgtccggcccggagcgagccacaccttctcgagtattccttgcctggctctagcgccgctcgctgtcggtccggtagagacggcagccccagagggagggtcaggagatcggctgcgctcggcaggcgtgctagggagccggcctccgattgagctcgacccccgattctctggtccgtccccccacctcacgcctcttcttggagttggagagcctacagagggtttggcagctcgcacgacgctgacgccgatgctcgtgtctccatcaggactctcgctggccgagacgtccattctcgcgtgccctctaacgccttcgcccgccagctcggctccgggcgactccccgcgggccgactgcgcactcgaccgcacgccaccaaccgactctcgtaccaacccgcttcctgaccggcagccgtcgcctcgcttgtctacccctttgctcggctcagatgcgtctccagcgcctggtcgactgcgtccgccgcggctcgcagtccaggcgatgtcgacgtcgcctccgcggcccctgcacccctcgccttcggcacccgacctgcgccaggcgccggcgacctcgtcgcttttcctgccatcaagctggggcggcccagtcgacagccagtcaccgggtccagtgccgaaggccaagatcggaggcaggaatgccaaaggtctgagcctcacactgggccgacatgcgcccgtcgagtcgctcggctcctcgtcggccggtttgccctcgcccggtccggcctgcagctatcgacggcctccagcattgcggacagcatcgtacaacggcacctatcagtcttcgatcccgccgacgccgttgtcagccgccttctcgcagccatcggctcagctgcatgcgccgcaggcttccgccagaggcccctcgctcacggcgctcattactaacgccgagatgcgtgacccaaccgatgaaccctcatcctcggagtacgagaccagggcatacgcggctgggccggtcgaggttctgccgcacctctggatcggttgcgatgagaacgcccgtgactggcggcatctcagcgaatggctcggcgtccggcgagtcatcaacgtcgccaaggagctcgtcggtatcctcgacgaggagctgcccgaggaggacaagccgccagaagctgctcatgcctcgctcttgccaccggctccatctgcatcgctccggtccggctggccgagttcggagcgcaccctgcggaccaccgtatccactccagaccttcgcgacgcgccacccgctgcgaccggcggcacgatcaacggcattccggtcgtcgagaagcgctacaacctgcccaacggcaaggtcatcgactacctccatctgccctggagccacggccaggcagatcttgttttgggcggcgcagacggtcgggcaggctttgttcgtgccggcgattgggcgacagaggctatggagcgcagcgagggcgttctcatacagtaagccctttcgacttatttgttggctctccacaagcctaatactgactggagtctcttcacagttgccagtgcggcatctcgcggtcggcgacgctcgtcatctccatcgtcatgcagctggcggccgagggcaagctgcacgacatcctcggcgagattcgcggcatgcacgacgcgtacgagtttgtcaagcagaagagcccgtggattggcccgaacgtctcgtgcgttactcttcttcatcctcccgtaggaaatatctgctgacgagaagacggtcgacagcctcatctaccagctactcgagtgggagcgcgcacttgctgctcggcttgcagaggaggacaaggccgctggtctcagccgccgcatcagtcctcggctcggcttcgcgtctgactcagtcgagtcggaggaggagtggtccatccggcgtgccgagctcgaggctcaggaggaggccgaccagatggaccgcgacatgattgagcgcttgcaacggccaaagggcgacgcgacgcctgccagctctgagccttcgtcaaggtcctcgtccttctcctccaccagcctcgggccgacgccgaagggctcatggcgtgtgaagcggcggctcagccgtagcagcctggccagcgtcacgaccttcgaagaggacgaggacgagcacgggcttgatcgcggtggaagctcggacgacccattacgcgtacaagcctgggcagctgctagtcagccatcctcttccaccggtccaaccgacgctgagagcgtcgaggctccttcaccgatcggcaactcatctgcgtcccaggggcttgtcgccgccaagaagcacgagcggcaacgatcttcgacgatgtccttcgttccttccctcgcgacgctgccgccatcaccgacgcaggcaacagccggcggctcgtctacctctggctctcaggagaacgagtgcgcacttcgaccgctgctcggtcgaccacggtcaaggactcatttgtcggcatcgacaccgagccctccgcccgccactcctccgcgctcgaaacgcgcaacgaccgatcctgcggcaatcggttcggcaagcgcgacgaccaacaccaacgccacgtcttcacccgctcctccgttccgcttttcatcaagtgccgcctcgaccagcacttctcgtttgtcgactgcctcgaccgacgtcgcccgacgtctcgtacaaccggtggcttcgccagcgcgcaaatttggcgctcacacatcgccggagcagcggagagagttcgtcctttcctcactcgaaggcacgattggattctcgctgagctgactgttcgcttcctgcagcgcgcatcgtcggtcattctccgttgacccgctactgccgcagcttcgaccgagccagcccggcgacgggcaccgtcggtcgaaccactccatctcgcacgtagatctcggcgcgttggccggccctggctctgctggcctctagcatcagacgttccccaagagatgaagccgagacgttcgctcgccgtacatgagcgccggaattcgaccctcctctttaccttccttcttcgactcctgccgagcagagtgcgatcctcgtctagctccgctctttccgagatcatgacacccgacttccgaaaccatggcagagcagacgtgagacgtggaggtggtgagatgccgaaggtggtgagggccagcctgaaagactgatgcaaaggggttgatgagcgcggatggggtaaagggactggcaagcacgcaggcttggcaaggcaagagattggcggcggggctgagtgcgtaaagcagagtccgtacaaggaaggcgtatcgaagagcagtgtctagggacgcgggtaaacggccgggcggccagtcgacgaagacaaatgggaagggaggggcgggttttgcgtctggagatggaacgaccgccgcgggtccgagtcgctcagactcggtgtcgacatgggcgagctcgcagtagaggggtggccggtgcggcgaggcgacgagggctcgaaagccgagtgtgccgacatctgcgagctcgagttggacatgggctgatgctggacgccagggcgggtcggcggccggtcgagagcccagctcgaaggcctgggttgcgagtctgaccgcgggcgggtctcgacgccaaacggcgatggcccgttgcccaagtacatcggcgacgaggcaccggagggattgcggccgctctcggccaggttggtgtccgaccgatgagacgagagccggtgggaggcgtgatcgccccttgcaggcggctgtaggggtggcgttcgcgtctgctgcttggtccggcggtgctctccaatttgagtgtggatctgtaagacacgggcagacaaaggcgggtcagcgagcatcctacagccgaggtcgatcaaccaacgcacctttgagcaagtcttgagcatgtccttgggcgggagctccgggttcttctcgaaaaagtcgacgatgttcgggtcgaggtacggcaggagctcgtccgggaccgtgtagaactcgtcctggcagtggagaagctggctgacggccttgatcgacttgaagctctcagccggaccgggctcgccggtcttcgagtagaggatgctaggcgtgatgacagtggcgaggttctccaggtccatcttgctgccggtctcctcgtcaacgtgcgagaacgaggcgacccacttgaggaagacaaagaggatctccatcatgtcgcgattgcaccgcggcaggaggcacacagtcaggtgcaggtaccgcctgcggtctgactcggaggccatgactggttgagaaagcgcgaaggcaaatgtcagcaaccgagtcgacacatgcttggtcggatggccggtccagacgtactctgcgactggcacagcagcttgtagagccggaaggtgagcagcggctcgggcatgtcgcgcaggaacttcttgagcagcgccgcgagttggaccgggttctcctcggtaaagttgacgctgccaggatcttgatcgagcgcttcgctgtcgtccttgagccgccggatgttgccgttcttgcggaagatgccctcgaccgacatgtctgtgcgcagcggcaacattgtagctcgtcagcgagagcagcaggagaccgaggcatgacggcaggcgacctacccatctgacgcatcgccgcaatcacgtcctcgacaaaggtcggcaccttgagatgagccgatgttgcgccaaggaccgagtcggagccggatcggtcgacgagctggtcgagtgggacgccaaagacgccggctgtggagaaggagtggacgtcagcagcgaatgatgagtcagggccagcgcgttctgctcacccttcttcttgacgtccttctccttcttgccggccttgaagagcttgttccagaagtccttgcgctttgaaagcaggtcgaggacctcgtccgtgtcgtactggtcgttgagcgccgaccgctggatctggagcagggcgaagtacttgatgaccatgccctcgaccggcgtcaggtcggcgatcagccgccggtcggcagcccggtccggatgcagccgcgcctgctcgacctcaatcaggtgcggcaggtcgccgagcgtgagcatgtcggtcgccatctcgtccggatcgatctgcaggctttccggcggctggtggcccgactcgggcagcggctcggtgacgatacgaaccgacgtgttgttccgggcaaacgctggccgcaggatagaagtcgtgcccggcagaccagcctcgagcgcgtcgcgcgagtcgggccgcgactgcaggccggaaggcgactgatcgcggcgatgcgagccttgcagctggatcggcgggcgcgatgaaggctgcccagcctgagtgccgagcacgctgttcggacggccgccggcagacgcatcgccgttcgtcggctggccttgccaagagggcgtcggggtgagctttggctgcacgacagacgaagagttggtcgccgcccggcccgatggcgcctctacaatggtcgaccgcttcggcacctgcgccgccgtcgacgacagcttgcggtcgaggctgaccgacttgacgagctttgtctcgttcgcgtcgagcgactcaacgctcccgagggtctcgtcgtcggccgattgaggcagagccatcgcgagcgcgacaggcggcacacccttcgacttcaagtagaagaagaggcgccggagagctgcgttgagcaggaaggaaaactgctcgagccgtgagaccgtctcgaacccgcgctgggcgtttggcggtgcggcccgcgcgtggaagatcttgtccgggacaaagagcagcgttgccgacgtcggcggcttggccgggacgtaaaggaagctcgaaaagtccggcgacggccggcgaggccgaactgcgcggccttccgcctcagccgcagccttgcgctcttcctttgtttccttcgtcgcagcagcctcgcccgagacggagcaccggacgcagtacgagtgccagtgggcaaagtagccgagccgggcgcactcctcctcgaccggcttccggcacgcaacgcacaggtcgagcgggacatcgcccgcggccggatcggcgcggatcagcgagtcgccctcgacgagaaagaggctggcgtagccgtagttaaacttgtcgacatcgcgctggggctcaccacgagagtcggtcgaggcccgcgccctcccgtccgacttctcgcgactcctagtgagccggcgccggcgagccagcgggtcgcctttgtcgtgagcgagccgagcgagccgatcgaggaactccacgagcgcggtcgcgttgccaaagtcgcgctcgagcttgagcgcgccggtgagggcgatccggatgaggatcttgaggtagtgcgcgagccgagtgacgagcgcgagcaggtcctcggtgatgccgcttgaccgccaggactcggtctcgtgcgtgtgcgcaaggagcgagaagaagttgacagttgtccgacagaggagcttggcctcgcggacgtgcgacatgcctgtcggtcgttcgagtgaggtcagcgctagacgtcggagagggcgcagaacagcggcggacgcaccccgaacgttggcctctgcaaagtgcagctcgagctggtcgattgaggcgaagaggacctcgacgtgaaagatgaacatttcggccatcgcaacggcctccatgtagtgcgcactgctgacgtgcgtcagcatctcggagatgcaggccgccgacgactcctcaaacgccgacaggaccgtccacacgcgtgtaacctgctgctccatgtcgatctgcttggctttgagtgactcggccgtctcagtgctctcctcatcgacgtgatccgagatgagtggcgtcgtcgtgcccgaggcgccgggaaagcgcgagagcagcttgacattccaaaactaacagagagcgacaaaaaatgatcagcagactgtgctcgacgaggtctgcagacgcggacgcaccttctggatcatgtagcactctggatgccagcactcgtcgcgctgattccgattgacctcgacaaactgcttgaggatcgcgacgccgcaaccgacgcattttgtcgcaaagcgggtgctgtagtggaagtggcagactgcaatgaagcgtcctggtcagtacggattcctcggcacagggaaggtgggatgtggcgactgacagacgtcgccgtcgtgctcgtagtacgagtcctgcgggccaaaaacggtcgggcaggccgagcaggtaaaatgctcgacgtgaaacttcttgccgcaggccgtaatgtagctcccgcggagcgctaagttgcacgtgttgcagatgaggtcgagcctgcgaaagtagtcgcgctcgcagagcgggtactgccggccgtcctttgcctcaacagggaaaaacttagcagcgacgaccacgtcgcaatcctgaggtggatgggcaggcgcgtcagcttttaagctagagaccttgaggaggcaggaagagtcgaccgacctgacagcggaagcagtcgaggtggtaaatcgtgttgagcgcgcgcacgaatggacccgtgaccgactggctgcaagcgccgcagggcgtgccgccgttggcggcgccggatgcggtcgcatggctgtttgccgagttagccggcccgctctgcgacgtgtgcgacagggccgaggacgagtcgaggccggggcccttgtacgggtagggtgaggacgagccgtgcgggtagctgtgctgcgatggcggtgaggacgagagcagcgacgctggccgaccgctcgagtcgtatgcgccctgcgatgacggcgtgttggaccgcgacgaggacgaggagaaggccgggtgaggcggcgccgggtgaaacgtctgggacgagttctgctggcgggcgtagagcgagtgctccccctgcgagcccctagacgggaccggagggccgtaagggatgtgctggtggttggacgagctaggtggacccgcatccccgaacccgcccggcgacgacgcgtccgagggcgagcggtggactcgaggcccacgcgagctgctgccttcagctcgaaggccagcctgcacatccgaatgatggctcgagactgagcttcgtccgccctcgctgctctgggcaccgagcgagtcgttccggcgtccggcgccgaggtaagcgagcccgtggtggtcctcctcgccgccctcgtcgtcggcctcgcctccgtggccgatcggctcgcgccactcacggccccaccccgacccagaacggccagatggcgaagggacgagcccgctcgaggcgcttggcgctggtgacggcgacgtcgccgaccgtggaggtggtgcgctgaagggcgacaggacgtggctacccgatggcagcgcaggcgcagacgacgggccatcctgaccaggcgacgtcggcggctggactagcagcttaggctgctgctgctgctgctgctgctgctgctgctgctgctgctgctgctgctgaccaccgtgcgactgctgttgctgctgcaactgctgactttggctcgagcggtgataggctaagctgccggaagggagcgacggctggccgtaagggaaaggcttgtgctgttgctgctgctgctggagcgccgacggcccgcctggcgggaaggccggcagcggacgggagctcgacgagagggacgacggcccggtcgaggccgagccgtagccgtcaggcgagatgggcgatccataggacgagtggctcgagagaggcggcgggtaggcccgctggctgctgctgctaccggccgtcgacaaggaaggggccggccggccggtcgatgggcctgcgcctccgtcctgcagcctgcgatccatcgcgggcaggggggtcggcgaagagagagtgacgctagagtcgtcgcagccgatccaggagcggcgagaagggagacggacgcgctgcttgcggaggagaagggaggatgcaagggagggaagaaggaggtcggtcgggacgcaacaacgaggtggcaggtgggcgggcgcgacagagcgacgcggcggcgcgcggaagcggcgtttacgcctccgtaagacctcgtttacaccggcctcacgggcggcccaagacgacggccccctttatggccagagatgcgtcttctgcgacagctgagagatgactgtcaagaggttgcagagcgcatcgagcggctgagagccatctatcacattgcagaaaagttgagaccgtgcagggctcgccgccgctcggcctcgtcctcgcgctgtcgagtcgaggagacatacggatcgggtcagcgtttgccgcgcacgtaggtagaacagggtgcagacgaacctgctcttttcggtggagcatcgtcacgacgccgcagagggcgagcgtcgtcaagacgacaaagatcgacacccaagggacaaagtcgctcggatgcaggtagagccgccagcgccagctgctgccgcctttccccgacggaggcgagacaacaacctgcgagttggggatgatgccctcgattgaggtgaagtgcggatctgagcggagtgtcgagccgacgaagagattctgttgaggggggaatatcgtcgtcagcagcgtgaacagtaccgcgccggccaggcatgacgaacctcgacgtaattgttcgtccgcccgaggccaaagagcgagtatggcgtctgaaggctcatgtaggacgtctgtggaagctgagcgactgtgcgtgggcagatgagtcatgtcagaacgttggatgctcgcacgcagcctccagccatcgccgtcacgcaccttgcgagatcgtctttcgaccgttggtgtcaaggatgacgaacttgaacgacgggccagagtatgagactccaaccggctggaagggtgtcttgtgggttagagacgcgcattgagaaagaacagtggttagggcggacgtacttcgtacgctttgcccttcgcgtcctttgggggacacttgccgtcgcagacgccggtgaggactgtgccgaggccaagcgcgaacagttagttgacaggtcgagaagcagatcgaagacccacgactcaccgagagccttaaggaagaaggcatcgttgtagaagccgttctgcacaaaggtcagacgttcgcccgactgcttgcccgtcctctgcagcagaatatcgagggagccctggagaagcgagaagagacagtagagggtgaatcagctcggttccaagggtcttcatcgtcgagccgagactcacatcgtcgtcaatgtcgaaaaacgaggcgacccggacgtctagcacagcatcgagcgccgccgatcccttggccggcgagcgaaacgtccgaccgaccgagcactccttatgatgcggcccgcacggcagtgactcgagcagcttcgcctggatgccgccgcgatgggcgacgacgacgagaaggtcggggtggccgtccatattgaagtctccgatccgaagcgggagcggaagcgcaggcttctgcgtcgtgtcgagcaagacgagcgatggcgagttgaggtcaggaatgagctcgctcaaggacagaacggccgttgtctggaaaggagtcgttcggtgtcagccttgcgtctcgcgcacaccgcttgcagacgtcactcacagcactcttcttcgatagatcgaacgcaaagtcaggatcggctttacagaggtccgccgccagtcggcagtggtcgccctcctttgattcgggcgtgcagagcggcatctgggtgttgtgggtgacgtggacagtgcagtcttggccgaggcccgttttggcgtcgacagaggcgcagaccgggtagaccatgtcgagcgtgccatcacggtctgcaaggccgtcgatgagttagccggatgatctctgtcgacgctctcggtgtccgcgacgcactcatatcggcaaaggtgacggcaccggcgccggccgggaagcggccctcgcgagcaagctcgaagctgccttggcggttgagccaaatctggaaggtgtggtcgccgctgtaaggatcttggcagtggaggaagatatctgagatgtgacgtgggcgagatggaagattagcaagacgcgagcgagcgagcgatcgagccagggcgctagagagcagactcaccggctagacagtcgccgtcgagatcgatgaaggcgctgctgtgcgggctagccagcttgcacgtcttagccgggtcaagaggagagtccgagctgcgtagaaggtgaggcaagaagcatcagaggtctgcaactggcgtctcggcttgtgccgcagacagaccgtacgcacagagtgaaggcaccagcggtgttgcgccaagacttgaagctcgtcgatttgccgccattttctgaggcgaggccgatcaggtcgggctgcatgtcgccgctgatgtcgacgaccatcggctgagcgagcgccgacttcgggagcgagacgggcgttgatgctgcgcgtcgcacagggtcgtcagcatcgctcgaacgagcacgagccatcctccgtgcagaacgtaccgagctttccgccctccacctggacgtgaatgtcgagttgtagctccgaggtatcggtccaccacgtgccgtcctctgcttcagacatgacgagcagatccagccggccgtcgccgttgaaatccatcggcacgacgttgtggatcttgtgcggctttatcaccgatgccgcgctcttgcggtacgtataagcagctgtaaaaagacagtcacacagatcagcccaaacgaaaccaagcgacggggtcgacctgagcgactgaccatgatcccacgtccagacggagaccgagcgttggtccttcgacagctcaaagaggtcgatgctgcgacgacaggataagcgaccgtcagccggcatgcatgacaaggcagtagcaggcggctagacgtacaactgatcgccattccagtcgcctagggcggcgacgcgaccttcaagatggtcgaggcccagcccgcccgcagctaagagcgcgttctccttgaagcgcggcttgtccgacgtcgtccagggtaggttgaagctgaacgcctcagcattcgaggctgccgtcgcgagcagaaagaggaggcttgacggcagcaggccgaggagcttgaccatcgactgggataggagtgagagcggcgggcagcggcagaagggcaggcgagcagatgagcgttggcggcgagagcgaccgaggacgaagccggctctgctctgccccctccaaggttcctctgacaatcaccctgttgcctagacttactgccccaagccgagtgcaacatcatgtcttcccacgagtgcgtaggagctagcgggatcggccatcatcgccgcttcagatgggctgaccaggctcgcgctgctccccctcctcttcaacggcgcaccgcagtgagaagcgccgccaggccatgctcgaggacaagcgcaaggcaatgatggaccagtttgagcaggagaagctcgcgatggccaaggtgcgtctctccgtaccgctgctcggctcggccggccgaagagctgacagtcgaggcgacctgttcccacctgcaggagacggagaagaagcaagctggcgcggagcgcttcgtcgcgcacgtggagtcgatggacgagcgcctgaagggcgccaccgtcggtctggtcaacctgaaggatttccaagagcgacgcaaggcgctcgaggaggagcaatcgcaggcgagcttgcaggtcgcgccgtgagtctgatctcacctgctcgaggcggatcagctgcgctagccctgcgctccgctgacccgctcgcgttgcgaccgactgcagtgtcgacgaggtcaaaaagaagaagaagaaaaaggagaagtcgaagctgtcctttgacgatgacgaggaggacggggctgagcaaggtcggtcgctgaatctactggagtgacttccggcgttgaggcgctgaccgccctccccttaacactctcttccgcgttgcgctcgccctcgcccaacagagccgccggccaagaaggcaaaggtgctaaaaaacccggcggtcgacacgtcgttcctgcccgaccgcgagcgcgacacgcgcgagcgacaggagcgcgaggacttgcgccgccagtggctaaaggatcaggagacgctcaagaatgaggacgtcgagatcacctactcgtactgggacggcgccggtcaccggcgggtcgtcaagtgcaagaagggcgacgacattgccgtcttccttgagaagtgccgccagcagttcccagagctccgcggcacgagcgtcgacaacttgatgtacatcaaagaggatctgatcatcccgcatgtgagcgtcgacttgcccttttcgcctccgccatttatcgctttgaaactgactctctcgcgcgccctgcctcccggcatcgtccgcagcactacaccttttacgacttcatcgtcaacaaggcgcgcggcaagtcgggcccgctcttcaacttcgacgtccacgatgacatccggatggtgcacgacgcatcgatagagaaggacgaggtgcgtccgctgatcggcggtgcctatctgcacctgcatgctgacccttggcgcccccctccctcagtcgcacgcgggcaaagtcgtcgagcggtcgtggtacaatcggtcgaagcacatcttcccagcctcgcgttgggaggtctatgatccggcaaaggactacggcagctacaagattggcggcgcgtagcgctcgcttgttctctcctgccactcctttccgcatctgcacgctgcctgctgtacgactgtcatgacccatgagcccccttgtttcgaccatgcgcagagcccgacaggcctgcagggcgtggaagatagcgacaaagccatgtgcattatgcgccgccgcccttgaggagcgcctcgaagccctccttggtgacgcgggcgtccttcttgccgccgcggccgaggatgttgtccttctccttcttgaggctcttctttgggtcgcgcgtcggttccggcgccttgagacccttgctgttgccctcggcctcctcctgcttctcggcctggagcaggatcgtgttgaacaggcggacgacacccttctgcgccgtcttgcggaggttgcgctcccactcctggccaccgatgccgtcctcgcgactccagccggtaacaacgtcacggatccggccccggtcctccttctcgtgccgagcaacctgaagcacgcgcttcgccttgctctcgagcgtccgggcggcgatcgtcttgcggaccgagggcgcaagcgagaggatgttggccgactgaacctgcgacgtcgacgccttggacggctgcttctttactgttgccgccgccgacgctgccggctgtgtgtggaggacgctcgtcatgagcgaaccgaacgtcgagggcgacgtcgcgcgacgcttgcgctctggggagtaggacacacggtcagctcctgttcttctcaagaatggatacctcagggcgacgtactagcagtcttcttgctcttgctcgccgcccggccggcctcctcaatctcgtcgtccgtgtccgcctcgccgccgccgccgtcgctcgaggccatgtcggcgtctaggtcgaactcgtcgtcaccgccgagctcctcgtcgtcgaggtcgagctcgtccgcgcccgaaccaaggtcgtctgccgcgtcctcctcgtcgaggtcgctcagctgctcctccttgggctccgcctgcttgcccttggccttggacgagctgctgccggccttgctcccgccggcgcgactgctgctgccggccgcggccgacgagagcgtaaacttggacttcttgggtgcgggcgccatcgagtggacaggccggttcagacgggagagagcgagaggtctgtccttgtacaatgggggccgagagctgcggtcgagggtaggtgtcgaggtcagggagactgcgaggcgagagggttgtgctgcgaggccggcgcgaggtcgatttgggcagggccaaaaagattaaaggatcgagcccctgaagccccctccgaacgacccgcccagcagccgctccggctgaccgcgatcgtccttttcgacatcctagctcaccatacctcttctgcgagccatgtcgaccaccaacgaagaatacgataagcttacggcggatcaggtcgccgccgatcgggcggcgcaagcggccgaggacgcggagcaggctgccctgccgtacgtctggcgccaggagctcgactgtgtgacggtcgacatcgaggtccctaccggaaccaaggcccgcgattttgtcgtctcgctcaagcggacgtcgatctcaggtgcgtcggagcggctctcagctgacgtcttgacgtcgagccctgaccaagagcgcctccgaccgcgtccgcagccggcctcaagggcaaggagcccgtcatcgccggcgagctcttcgcgcccattaagggcgacgatgactcgacctggtcgctctcggacggtgtcctctcgctcgagctgcagaaggtcgagaacgaccgctggtggccccacgttgtcctcggtgcgcccaagcgcgacacgactcggatgatgccgacgtcgtccaagctgagcgaccttgacggtaagcgtcccttcagtatcccctgatccgtttcgagagttgctgatccgttgctatcttcgacaggcgagatgcgcggtgtagtagagaagatgatggtgcgagatcgcgtctcttgacttgtagggtcgccccgacgctgaccccgtcgctccttccatgctggatcagttcgacaaccggcagagggtgagtcgtccacagaaggtcggtattgaggcgacaggtctgaccactctattcgcaggacaagggcttgccgacgtcagacgagatcacgaagaaggaggtgcgctggctcgattgttcgagttcaacgtctcacctgctgctaaagctgacctggccgttgctcctcctcctcagaacctcgagcgcttcatgaaggagcaccccgaaatggacttcagtcgcgtcgcccagtgatggatgaacctatgacgacttagcgggccacgccctcgcttctaggtacagcgctcttgcaacagccataagctttgagcgactcgatcgtctctttactcctgtcgcctcaccggcccgagccggacggcgcctgcagccttgaaacgacggatcaagcgctgtggcccagctgagccgccgagcgtcgctctacgccgggcgccagactcagccgccaccacctgcgcggcttcagccgccccgcagccctccctccgacgccgtcccgacctgcccaccaccaccacctcctcctgcccgtctcttccctcttgtcttatcggcagccatgttcgcccgtcacctcgcccgctcgagccggctcgcgctcgcacggccatctctccggctcgcttcgcacatccctccccggcagccgtacgccaaaatcacgccttcgtcgctgcagttgctcgcccaactcgtcgggtcgccgagccagatcgtcagctcgatcgctgccgagggcattaagccagtcgagcaggaggagctcgacgtttacaacgaggattggatgggcaagtacaagggcaagagtggcgtcgtcgtcaagcccaagacggcccaggaggtcggagctatcgtgcgtgcctgtccacttttggcataggatcggtcaggcgagcctagcatactcgcggctgctgccgcagaggagctgctcgaggcgtctgggcgtatcctatccgagggcgagctcgggacgagctccaggcaggggggagctacaccggggtagcggatccgagtgccgatgacgcttgtgctgaacttctcccactcgcccctcctgcagctcaagttctgcgacgaaaacaatattgccgtcgtgccgcagggaggcaatacgggtctcgttggcggctctgttccggtttacgacgagctcatcctcaacctctcggccatgaactcgatcaggagttttgaccccgtctccggtacgtcgccacgcgccgcagaccgttggtttcatggtgccctaatcaaccgctttgctttcaggtgtcctgacggtcgacgcgggctgcatcctggaggttctcgacaatgagattgccaaggacaactacatgatgccgttggacctcggagcaaagggctcgtaagtgcgcgcgagacgcttcgcagccacgcctatcgagactgacctcgaccgccccttcaggtgccacattggcggcaacgtcgcgaccaacgccggtggcctgcgtctgctacgctacggctcgcttcacggctcggtccttggccttgaggtcgtcaccgtcgacggcaaggttattgactttggatgcgagaccggcctgcggaaggacaacaccggcaccgacctcaagcagctcttcatcggctcggagggcacgctcggcatcatcactggcgtcacgatcctctgccctcgccggccgacgtcgaccaacgtcgccctctttgcgctcagctcgttcgaggacgttcagaagtgcttccaggcagtcaagggccacgtcggcgagattttgagcgccttcgaattctttgacaagcagggctacgagctcgtccaaaagtatgcgactggcgcgatcgccaagaacccgctagaggagctcgccgagttctacgtcgtgcgtcgtgcccttcacttaaggtgtctcctggtggactggcagctgatcgcggatcacacgctccttccaggtcatcgagactggcggttcgaacgaggagcatgatggcgccaagcttgagtcgcttctcgagcaccttctcgagtctgagatcatttcggacggcatcctcgcccaggactcgacgcagctggccgcgctctgggcgctgcgcgagtcgatccccgaggcggccggcaagtgcggctccgtctacaagtacgacctctcggttccggttcccaagatgtactcgctcgtcgagaagatgcgcgagcgtctgacggaaaagggcctctacaaggagggcgatgaggacggccgcaaggtccggacgattgttggctgtgagtctctccttgtctctgtctgccgccgtcaggggaatcctgtgctgacttgcgtactcgccacagacggccacatgggcgactcgaacctgcacatcaacatctgcgccaagcagtgggattctgaggttgaggaggcaatcgagcccttgatctatgagctcacctgtgcgtctctcaacctttcatctcattcactccactcgactactgacgttctgtctcttcttcgctcctctgcagccgccgagaagggatcgatctcggccgagcacggcctcggcgtcatgaaggcgccgcacatccactactcgaagtcggccgacgccatcgctatgatgcaggcgatgaagaagctgctggacccgaagaacacgctcaacccctacaagtacattcttccatagagagattatgttcagcaagagcaatcgtaacctaggcaggcgaaggggaagcagtgccgagttctactgccaacggcccaatcggcgctggcgctcgcgaacccactcggcccagccgccccaaccgctaacggtgacgtcgggcaccaaccgcacattctgcccgccaggtgcgagtgacgccatctgctcgagagtccactcggccttgggtcgctgcggcttggtcttgtccgtgacttggatacggccgtcgagcttgtatgtgagaggcgaaaagtgcttgacgtaggcgacgatcgaatcgacctggccagcgacacccggcggcgcgaccttgaaggggtgaggcaggatcgaatcgccgcccttggccctgagagtagggcgatcgacaagtcagctcgagtcgcagcgaaggggaagtgcggcacgtacacaaagtcgacggtgacgatcgctgcgaggcagcaaaacagcttcgatcagcgacgtggcgcaaatagttcctccctcgaccgagctcactgtaggaacggtccatcacaacatcctccagatccgggccgatctgaagggagatcaaccgagagcccttggcattgtgtggattgtacgtgtactggcagtgaagagcaagatcagacgtgctcttgtgttcttcgtgcgaacaaacgcacccgcatccccgcgatctggatgcctgccgtcacaaccttgccggccgagttaaccttgctgaccgtgccctcgatgatgtcccagagctcgctgccggtgagcttgatgtcgacgagctcgccgggcgtaaacgggaaggcggtcgcgatcgcgcccatcgtcacattgggcgccgtcacgccgttgcggatgccgccgctgttgtgcatggcggcgtcgacatgggcgccgatggaggtgcgcgcccaaaggaaggcatctgctgtcatgtcgcccatcgtgcctgcgagacggggacggtcacttcagcgctgtaagctgaggcgcaggcactgctgattacgcacattcgccgtccttgcatcggctctgatcgaggtcgaactcggtctgaccgatcaccttccgcgcgtacttctcgaacggcttgcgccacttcttgactttggcctggtattcctcgtctgctcagatggcgggcgattgtcagctaggcgctggccgtgtatgagagcaagcggcgagcggccgcactctgaggatacttgtcggtcatgcgcatgacgctgccggtgtacgacgcgaatcggcccgtctcggcctcgaatgagacatcgatgcggccgagatgctcgccccacctgacacgttgccaggctgcgtgatcagtggcgagcaaagccggaggcagaccgaaaggggacgctcgcaccggtacgactggacgattggcacttcttcgccatcgaggttcgtccgtagcgtcggatacggcccttggctgtaccacgcctcgccaccgagcggagtgtgcgagtggccgccgacgatcatcgagatgttgcgcgtcgactgggcgagcagctggtcctgctcgtagccgatatgggtcagggcgatgacgcgcttgacgagcggcgcgccagcggcatcccgcccgccaagccggccgtcgagcagtttgtcgaccgtctcctggaccgtgatgagcggagcaaagtgcgtgaggttggacggctgcgagatgtctggcgtgtccacggtcgtgagcgccacgatgccgagcgagtgctcgggcatgacgaggaagggcacgagctgcgcggcgagggccgggtgcgccgtcttgatgttggtcgagacggctggggcgtcgaggctttcgagaaagtcggccaggacgccatcactgcggtcgaactcgtggttgccgatcgtgaaggcgtcaaagtcgaggaggttaagggtctcggcaatcttggccgtcccataatgggaatagaacagactgccctgacattcatcgccagcgttcaggaggagctgcaagggagaaaactcagatggtcaattcggggtcggagagtgtggaggaggatctgagcgaaaggggccgccgcaccacgggtacgtcgccgttgctggccctgacgcgagcgagttcttcgatgatccgagcatagccaccgagacagggctgactcccgtcctcagggcagtcagctccagaagccgtgtattggtcgaggtgagagctgcaggttccggcagcagacgagggtcagcctagggctgacgagcgggtgcggcggaggccgacacgcatctgggcgcgacgcgggcagaggatcagattcggacgcactggatgtcgttaacatggaggagagtcaggttgtacgtgacacttggtgagtgcgatcgcttgctgagcccggtgagccggctcgagaccaggtggacgtcgtcagaagcgtgcgctgcgccgagcgcggcgagcccgtggaggaggaggctgaggagcgctggcggcatcgctcgatgtcctttgccgagagctgtatgggaccttgtagagtcaagagctgctacaggtgtgtcgaaagcggtcttgcttgaggatggcaaggttgttgcgtgagatggtgagggaagggcggatggtgtcgagggcgagcgaggacggacgctcccgtctccgctgaccgtcacttcctcaagcatgctgccttcccaagccagcccctcgcttctcaatcagattccagacgacattgcgctgctcgccgccctttcaaaccggccggacctgctctcgcttctcccttcggctggtccgtcgtcggcctcatcgctcgcgaccacggagcgcccgaccgtccccgagcaggcgtcggaggcccctccccagacggcagatgcagctctgcccatcgctcgggactttatggcggccaccgcaagcgacgtcgccggccgggagaaggaggtcgagcgactcggcgagaagattgacagcttgcgcgcccaactcgaggaggttcgcgacggcctgcgagagggctcgtcaaagcccggctgggccgtgcaggaggatgatagcagtagcagcctggcgtagaacggcatctcgacgcttcgagaggtgcgtccgcctgtgccaatctgaccggaccgttgtcgtgctgatgccctccgactcctcccctcgcgccctgcagtctctcgagcgatggcagctgcctgacggacgcctgcagcgatcaccgtcgaatgtcgccaatgtcagctcgatcgactcggaccagacgtcccctggccatgcctcgatcctcgctccgaccgagttggcctccgcgcccactcaatcgatgtctgccccggctgctcctgctggctcggtacgcagccttgcctcgtagctcatgtatccacttcccgctggtcgcctgatgtagccaccaactgcagccatcgtacgcaagtcgctgccagcgatcagcgtagcgaacgcaggctctgttgcagcttggtgcgtctgctgcctcaaccggcctcgccggtaacccggctgacctctggcctcggtggtctcctgcaatccagtcttcgagcactcgacaggacctcatcaactttagcttgcctcagacgctctgtttcgctgccgacattgcgttccaagcgtctcgtcgtccccggccacctatcgtccttcggtcagcgacttccgtcaccctttccagtctgcgaccaacgagatgcccatgtctgcatcagcctcatcctggcccctgctcgtttgctggctgttcggaaagccgcttgggcgtacgcgagctccctatcgcacctgccggccgtcaacgacatcggcatcggtccttctcctttggcttaggcaaggacctttgtgttccacgtctcgcacggctgactccccgggcctgacctgagcgtgccgtcgccaacccccaagcatgcatggatgcgcgaccgggcgcaaaggcgctagggcaaacatccgacccggcaagctggctgctggccaccgtgtcgctcggctcggcagccccagcagcatccctcttcgttctccttcaaggtgcgaagcgctcgctgcaattattctgacccttcgtacttactgtctctcatcttgcgaggtggtcgaccaaggcaagctgtcaaccttgacggcaccgagcacacgcagagtcccgcaggatggtctgggcgcgcagagtcgcctctgaaacgccactcggccctccccgcggccccccttctcggctgcgagcgaataagaatgtgaagcgacaaggacggggaggagcatggaagagaatctatagcgacccgcccttgccgcttaaagattgacatcccccgacggccggccgtctcttttccagccgcccttccttctttccctgctcctcctactcgccggcatgccgtccatccagcgcctctttggcctcttcgccgctgcctccctcctgctcaacgcctctgcccttgcggccagctcctgtggcgcagaatccacgacctgccctggtggggtggaaggaatgggatgggctggaggctgatgtggcaatgcacgggcacgtgagttctcgttccccttgctgcggctcatcgataggacggactactgacgacatggtccgttgttcagctgggggaggcaacatcatcctccctgccatcgacgtcacaactgcaaggcagtgtgcgctgtattgcgtttcacccgaagccaaggtgcggtcgccacggctcgtcgagacctgctcaagaatactcggactgaccttacgggcagaccatcaggctagtctcgcgcgcagatgcctcgaacaaacgttgcggatgtaccaacgcagattacgtgccggtcaacccaggcgtctgcggtcccagcaccacttcgggtctaaccgcctactacgtccgcgtccctccgccgcctccgcggccatcgggtcggaagcgccaactcgcggccgtcctcaagcaggctaacgccaagtctctttcgctctgtccgggcgatctcacggcctgcagggacgagggaacggtcgacggctgggaggtgtgccgtcccggcttgtccggtcgatttgacagggacgctgatccctccctctttcgacgatcagtgcatcgacactaaaaccgagctcgagtcgtgcggcggctgccggcacggcgtcttcgaaacaggcaacgaaagcgccaccagccgacgcaaagcctggccttggcctcgaaaggtcctgactcggtcggagtcgagaacgtctccccctcccgcactcccgagtgcctccatgcccgccgacaggcaccacccctcgtcccttgaccacccactccagctgctccgatctcagacgcttcggatctgggtggacgtgtcgcgagggcgtcttcgctcggatgtagcctccggggcgcagaccatcacatctcccagtccccctcgctcagtctccttatcaaccgtcacttagcctcgcctccagacgtcagcaatttctcgcgtgcatctgttcgtccctccttcattcctctaccgctgagcacgccgtcccctcctgtgggccttctctcatgatgtacgtttacgtgcgacccgccgcgagccgcctcccctcgaccgctaccctcgagttagcgtgaggtgttatacagtattgctgtgacgcgtgggccgtcgtcgcctggctctgagagtcgttagcgtgggcttgtatttggagagcaaccggaacgttctcgccctgcccgtccacgtccagcgccgccagcaaggtcgccggaagctctcgcccctcagtactccagccatggtcggcctcgagtgagtcctccgccgttggtcgtaagtctgcctcgagattaccggctgacgtccgcattcgtcgccagctgctaagaccgcaaccactttggcccgggcttgacgtgccgcaagggcgcctgcgtctcgatgtagacgacgtcggtcgccctcggcagaccttcacttgtctattcaccttctgtcggccttccttttgttcacacattcccgatctctcgctctttgccctgttcttttcttgcggcgccgtttgtcgtccttctttgggcgctggtgtcatgacccacgtctccgcagcagcgcgcgactctgcgggtctgtagaaatcatcttctagagtggtcgtcatcaaggctgtgccgtcctcatctcaggcgcatgacggagagcggtcgtcgagcggtacttcttggtcggcgggatgtgcaatgacaggcgcgcagcaggcggcggcgcgtgagtcgaccgacctcgagccgacggccctcctccgcctgaaagtcgagggcgagccaagagaccggcgcacagcgtctcgagcgtaattcgtggcccgtcacccaggcagggtctcgtacgtgagtaaggccggtggcgatttaagggccgtcgacgacgcgacgacgcgcccgcttgatcgagtgccgcgccgtttcggaggccgaccttgtccttcgtcgtcgagcctcctcgtcccgacctcacccaccaccctcacctccagctcaggcagcccatcaacccttgtcaacccctgtcggaacgcaaaacatcgagcgcatagtcacagcatgtcacaccagcaggaggtccgccttcccttggcatccgtccgccagccgctgacaagcactgacctcccgtcgctcccgcctcctgccgacgttggctgtggtcactcgcgttcgcccgatttccagcaatcgacgatcggcgacgaggacctgatcccctcgcagacggccggctacaagcctggccaggagaagacgctcgccgagctcgccgcgctcgaccaggaggacgagtcgctcgctcgctggaaggctagcctcgggctcgcgagctcgggtgccgccgcaggagctaagaaggtgcggcccctactcgatctctgccgctctcttgttgctgccgaattaaaggattacgctagtgagagcgacctgctttcgtcctggcggcgtgtccctgacgaagctttagccgaggacctgttctgcccgcgacggtctcaagatggcgcagcggccacgtctcttccctcccctcgcgccgtatcactgacctcggctctctcctcctctcctcaccaggtcgtcccgcttacgctattcctcgagtctccgacgctctcgacacctctcatcctcgacctgaccaagggcgaggccgagtttgcccgcctgaagaaggagcctagtgagtgatgacgctcagttcctcttcgagtcctgctcagtctatgacacgtccctttcgtcaccgcccagtcaacattaaagagggcgtcgattactctgttgggatcaccttcaagtacgtacgctcactagggcgctgtcgctcgcctttgcagcgacccgagtgctgacatcggagcggctgctgcgcaccttcgaagggtcgagaaccagatcgtcagcggtctcaagtacctccaggtcgtcaaacgcggacctctcaaccgtgcgtctgaatttgtcctctactttgaggtcgagcgccgtaaatagaccagccactgattctctcgcctgcctgccgccacctccctttcagtcgacaagatagagaagatgctcggctcgtacggcccgcagaccgagcctcaccggcgggcgatcgtcgaggaggagtcgccgtctggcatgctcgcccgggccgggtccaacgtcgtccgctcgcgcatcatcgacgacgacggtaccgtctggctcgactttacctgggcgttcaagctcacgaaggagtggtgagcagagcacgtaagggggctcgccggctccagagggtgccggtcacgtgtatggccatgtgcatggcgtcggttatttgtttaggtggtgtctaggcgatgggaagaggcgccgtcgtctatagaaggtcgtcaagtgtcgtgattgatcggagatgaaaagagagcaagaagaaccctcaacgcgggatgcctgcggcctttgcctgaacggccatgccggtgcggacgaggtcctccttggtggcgaatctgcgtgcggagaagggttaagcggcgtcaggaccgatcgcaacggtcgccgatgcatgggcaggcgtgtacttacgtttcggcgagaatgaattgagcaaacgagctcgtctgccagtagtcaccatgagccgtgaccatctgcagggaagggacctgagtcaacagaattgcagtgacgactcaatgttgaacctgcgacgcacgtcgacgtattccgagatggctccgacagtctgcagacagaagtcgatgttgccgtgcgggttcagcgcagaaaagcgccgctcggcctgactacctcgcagccgctcggagccgacaggaccaaagagctcgacaccgctcgggaggcggatgacttctggacgcttggccggctgcgcgctttgcgccgtgccgaagggctgcagaggcaagatccaattcagccgtcggcagcgactgcgcgcaaggcaggcgtactcacgttcggcaggccgtcaaagatcttgctgaggctaccgacacccgtcttgattgtgtcggtaaaggactccaggaggccagccgtcacgttggagatctgcagcggctcgagcgtccgggcatgcttggcgtcgaccgtcgggttctgtgagaaatgaacggatgagcctttggtgagcagggagagcgtctctgctgcgactcacgagcatgtaggcgatcgggtccgaagggtgaaagatgttggtgagcgagtcgacggccaggcagccgaatcggccagcccggtcgagcgcctcgtcaggcggcgagttcttggtccgctcccggccccgacgcgggatcagctgggcctggcgcagatggagaaagagaccgagcgggctgccgacgaggtagaggtgactcgtgttgaagatgaaacggtcgtgcgtctcgtagatcacctgcgcccgcggtcgaccgaagattcgtcagcctgatccagggctgtccaagaccgggagacggcgtacctgtttcggcagcgaagacatcttgggcagcgtcgttgcctggacgctcaggatctcactgacgagcgcagatccgagctacaaacgtaggctctgcgtcagctcgggccgaaggcggattacacttcgcgaggagacgcaccgagtgggcgatgatgtggacgcggcccttctcctcaaactcgggatgccgcttgacccatagccggtacgtcttgttgcacgctatcgcgacggcgtcgaccatcttctgcttgtgctgctcgctcatgaactgtccgaggcgcgcatggcagggtcagctcaagtgccaggctgcctaagggtcaagcagtaggccgacgaacgtagggaatgtcgatgaggacgtcttttgggccgccagggaggagacaagtcagttgaaggacacactttgccacttgatcacgccggggcacgtactgttggtgagctcccgcacatacgggatgctcttcttgagcgtgatgtcgtcgagcgtgaagctggagggggagacaaccgtcagtagcagcactttgactcgcgtcgggaggctgatggaagcgcaccgattgtgcagctcgtgatcgatatcctcctgagcctccgcgctcgaatgtgtgagcttgaggctcgctcgccactggataggtaggaattggacctgacggccgcgcatgatcgaccgaagcgcaggagtcgtcgcctgcttctgagcctccttgcgcaggtcattggcggcctacgaggtcaattatataagagtcagagagtcagcacggggacagccgactttgctggtacgagccaaaagcgctcacgtagacaaaattgaagccttcatgcgtcgatgcaagctctacggggcgcggcagcagtgcagggttaattctgacgctgaatcggcgtcgaacgaaggggaaaatggcacgcacgctggccgataccgtggacgaccaaaattagatccgtcacctcttcgctcggcggctcgccgggctcgccgtgcacgtcctgagtcggcaaatcgacgccctcgaccttgtcgtgctcgcctgacttaacgccgcgggggctcgccttggcgccagcaggctcgccgggtccaagcccgggcgcgccttgcgtctcgagcggagtgatgccaacaagctcgccgacgccgcgccgcatctcgtctccgagatcctgggccacgtcgccgaggttctgggcaatctcgccgccgagccggagcttgtcgccgagcgactcacgtagctcatcaagcgacttgcgtgagcggagcggcggcttgcgcgttccactgcctccgggtgatgacgacagcttgccgtccttgccgctcctcgtcgaaggtgcgggtgaaccggagcgtaccgagcccggtcgtgacgagccaggccgagcgccgtcaagcgaggctcggggcgaccggctcgacgtaccggccggcgggtgagcagcgagatacgcggcggcgtagccacggtaaacgagagtgccgcccgtgtttgaggcgccaccgtagcggagggcgctccagagtgtcgctgagaggcgcgaggtcatgctctctctacgtcggtcaggcggtagaggcgatcagcgccagattcgcatttcgaatggtgcagagaaggagcgcacgaaatgatgcgaccgacaccctcatcctggtagatgatgaactcgcccccgcccggaatgagggctttgctcttcttgagctcgaagcggagcttggcttcggccgacttgcccgtcgtcagcgccgtctggagctcgacgccgtacgactcgacccaaggcttgatagcactggagaaagcacattatcccggtcagcgcttgtcgagcagaagctcagccgcagaaagacgtacaggtagccctcctcaagctcgtccgacagagcttcggcacacggccggtcttctgcgaagaaccagcgaccccgccggaccgggatgtttggtccccggtgaagccagtagacgggctgcagcttcatgtctggcactgagacctcgaagagaccgtcctgatgacggagggcgggcgagtgggtcagagcatgtctcggcgcaacgagcgagacgacagtgcggccgcactttgccgattgggacgccgacctcggcctcggctgcctcaatctcgtcagctccctctggcgcccggtcttcgagctcggcgccgtcgctgtacggatcgctctcgtccgcctcggcgatcaggtcgtccttgccgccgccgacctcgacgatgacctccttgttgcgccgccgttcggcctctttagccttgtcgcgcgccgccttctccgccgctgcaaacgcaatgtcctccggcgaagggttcagggcgaggcacgtcgcctgcgcttcgggcgagagctcctggaagacggcctccatctgggccgactcggtgcgcgtgaaagcctcaaacgtcgaggctgggtttgtgacgggaacgccctgttaaaggacgtggtcggtcagtctcgaggcctcgtgaggcgagaggagaacggaggacagacgagcaggtctaggaacggccggcccaggtgcagccagcgcgcgtcgagcgcgggcggctcgtcggccgggtcgttgctccagatagtcatcgtccgactccttgtacgatacgctaggtttcggtggacgcagaaacgtcgcttgtgatatgtataagggtaggcgagcgttgaaaacggctgcttcgaagggatggaagcaaagagggtgagctggcgtgcgtcatgagcttcggctacgtcggacccgcccgggcggctcgtcgaagacaggccagtccttccctgccagctcaggagagctcgtctgatgcgtcgaaggacgtccgagggctctccgacaccagtccagtaggcaggggaggggagccagcgttacaggccggttgaacgagcaggccgcccatgctggacgcctcgtgctgctcgcttcttccggaagccggtaaccgacaacagcatgctgctctttgggcctgcctgagcgcagccgaccaaactcgctcctgcgagactctaccctgcacgaaggccaccctatactcgaggaccaattgcgctgccaagcagggaagactgactgggttgctggaaggtggcgagtcgtgtcgtcggtcgttgttcgaagcgcgttctggccgagtctcgcttgcgtcccgcgtcacaattacgccccggagtgacttgcgtttacgtagccgtaacgagcagcattgtcgattcgccggcggccaggcgcaggcgaccgaccgaacctcccctcgcacacgaccacccggcccctactcctctctgcatctagccatgtcggacgctccttaccggtcttcgtcgctcctgccgatgaagcgctcgcgccaggcagccgcctcgccgggcgacccgccgacggacctggccgcgcccgcgccacgccgggcgaagagtgtgtccgacgttcgctaccgcgagccgctcggccgaacggcgaccggctttgcgagggccgacaagggcaaggccaaggcgacggtcgggacctcatcgggcggcaggctcggcgccggtgcggccgacggctggaagggcgacatgttcggccgcttcgtcgagaaggcgctccgcgacgtcgaggagctggtgcgtcgtttcgcccccaccactgctgactaggccggccgttctcgccaccggccgatcaggggatcgcgcatcatcgagcttgggtccggtcggctcaggaacggctgtcctgacatctgctgctcgtctatcctctctccagggcgacacgacgacgtacgacgagctgctctcgcagctgcgcccccaggcaccggatgccgcagcctcgacctcaacctcggccgctcatcagccgtcgctgatccacccgctcttgctcgccctaacgacgcacgcctcgctcctgtcgtcgacagcccaccggtcgctgatcgaggccgtcatccacttcccgtggtcgacggccgacgagggttttgtcgagacgtacatgcgtttcatcggcgtcctcgtcagcctgcgcatggagtggctcggcgaggtcgtcaaacgctgcgtcaagggcctcaagttccgtgagtgtgctctggcgatgtcctcgtctgtgcgaagcttgagccggatgattgggactgacgtcgactgcgcgcgctcacactggcagagccacaatttaagcagctcctccttccgtccgactcgtcgacatcggccccgctcacgcgcggagccctctatcatcggcagcacgtgttgctcgcccgcctcctcaccctcatcccgaccctgccctcgctgctcctgccgctcctgctcgccggctttccgccaaagcgcgaaccgcgcgtcgcccacaccgtctggatccggaatgtgcttcgcgtcagcggctactgcccgactgtcggcgagcgcgtgtggggtgccgttcttggccgagcgctccagatggacgtgagtgcagcctctcagcgcgctcaaccgctctttcggcaaaacccgtcggctgaccaaaccttgcacgcctgcgctgtttcgtccacgcaggtcgagatccaggtcgaatgggacgagctcgaggacgccgaggacgagaatgaagacgccttatcggacgcgtcgtttgactcgaacgccgatgccgacccgttcgagaagcttgtcgagctcgcgctcgtcgacccggacgaggacgacgtcgagcccgaggcagagccggccagccaggacgattcggacacggagagcgaagctagtttcgaggaagaggaggagctgagcgagaacgaggaggctcggcgcaagcgcctgcgtggcatcaaggagatggcggccaagctcgacgccgtcctgtgtgagacgtttgccttctttgccgccggccaagaagaaggcggctcggcgacgtcgttaccggctgtgccgccttcgtttagtgtcctgccgacgccggccccttctcgctcggcgacacctcagacggcggcggttgcagcccagcagctggccaagcagcgccagcaccaattttcgacgctgctctcaatctttgacgctctcatcctccggaccttcaagtcgcgctacacccaattcctcctcttctggtacgcctcgcgcggcgcggcctttaccgaggactttctcggcctcctcgtcagcaaggccctcttcgagcgcgatcagcccgaggttgtccgcaaggctgcggcctcgtacgtcggctcgttcgtctcgcgcgccgtctgggtcgacggcccccaggtccggcgcgtcgtcgaccttctctgccagttcctcgaagcccaactcgagatcgtccgcctccggcccgagctgctcggccagttcaccaaggccggccagcgccagggcggcctcggcgtcttctacgccgtcgcccaagccgtctttctcatcttctgcttccgttggcgcgacctccggctcgacgaggacgaggacgagctcgagatggacgacgacggcgacgacggcacgcatggcgccaagggcggccgctgggtcgagggtctcgacgtgctcgagcgcgtcgttctcagtaacttcaacccgctcaaggtatgtccctcggagtgctctgcagagttaccaaatggcccgctcatcactcgaccgttgttccactgcaggtctgctcgcccaacgtcgtcacgcagttcgcccggatcgcgcacgagtcgggcttcctctttgtctaccacatcatcgcctcgaataatcggacgtcggccgcgccaagcggcgcgtacacgagcgcgctccctccaggcggtagcctgacgagctcggtccagcagcacgcgttcctcgcggccaacggcaagctgccggcaccccagccgcgccaggagcgggacgccacccggcccgaggccgtcgaggaggccgacctcgactcgttcttcccttttgaccctttccggttgccgacgagcgcaaagtacatcgacgccatttaccgctcgtgggaagggcccgaagactctgactcggacgacgacgacgacgacgacgaagaggaggacgagcgggccgacaccttttcaaccgagccgataaacgccatccctggcaaacggcggcggatgcggctgagcgctggcgacggggtagacggcgagggcgacgtcgccgagctcggccggtcgttcgagcagggcctgagcatgagcgtcagcccggggctgggtgtcgccggccggatgggcgtcgtcgcctgagcgcgcaccgtctcgtcctttatcgttgtatggatctctgctcgcgtgtcagtatgtcagggacgggggagggaagaagacttagggtttcgcgttgatgaccgagcaagggggcgcccgttggccttgcttccgccaccactcgacgacaccacccgagcctcatccggccgctcccccaacgaccatcccaagacgcctctagtagccagcgacacccttctccacctgccagacacctcggcttgcatctctctctttctggcgctcgctcgagaccaactctagggacgcccgcttccgtcctgctgctgctcggcgcctctcgcaccgcgccctccaactggccccttcgtcccggccggcctccccgtctcgaccctcccctccagccggacgacccatcgatagcacgccaactcaggtttcgaggacgaggacagcacccgcctttgctttccagctcgctctcgttcgccctctttcccggtctcctcagcctcctctccgagccccgatggcgccggcgttttggtcgccgttttcgtcggcaccccgcacaggggggcatcaacacgcctcgcgccagcctggagggtcgttttcaaagacagccactaatctggcacctgacgagatggctgtcggagcagaggtcaatctcacgacgacgctcgtcggccctgcagccggccgacaggagcagcagcaccgggctggcggccgttcgagctcggacccgatgtcgcccggggcgctcaccacgaagcctccggcgctctcgctcgaccggctccctttcaggacgggcggctcggtcgccctctcgtctgcgagccgctccgcctcgtccgactctgagcagtcgtcgacgcggacagacgcgaccgacgacggctcgggcgccgacagtggctttgctcggctctcggccgcctcgtccgtctcgtcccttcatgcgtccgacgacgggcagtcggccgccggcctcaacagctggcttaaggacgccgttgacggtcggtcatccagcacctcggcttctttggccgcgcgcgaggaggcgacgcccagagcagagcggccgcccgtcctcgagctcacgacgaccacgcttggcacggacgaagcggttccgggaccttcaagcgggtgagtttgaggctgttcatggtcctcgtgcggatcgcatggtcgactgacgcgagtctcgcttttgttcagaccacccagcccatcttactttccctcgccgactgagacgagctccaagcccgccgcggacaagcgcacccgcatcgtctctcctcctccggctggccgatcgccgtcgttcccgcctccgccgtcgtcgacagctggtcgtccgatcaccggtgggcggagcagcagcatcgacacgccgcaaggcagcgggcagccgtcgtggcggtcctccgtcttttcgacgtcatcgtcgagcggcgcgagcgtctcgtccgctgcgagcagctccgtcagcagccagtatggcctgagcagcagctttggcagcatgtcgagcggaggcggcggcgttagcagtagcagcagcagcgcttgctcggtttcgactcctgtcctgccccggccttggttggcgagcgatcagctcttgacgaaggccggtccggtcgacgacatgcgtgacgaggcggcccttctcgtcgagacgaccgacgagagttacgtcgtcgtcgcctgtcttccaggtttctcgtgcgtccttttaccgctcccttgcgctcgagcgtctactcagcagctgacccacctcaatcctaatcttccgattgcgatcaaggctcgactgcatcacgctcgcgaccaagtcccgccggacgctgcacatcgtcgccgaccgctgggaccgctcgcggtcggcgcactttgagcgcaaggtgacgtttggcgccgacgccgatcttgcgcgcattcgcgcccagtttgacggcgagatgctccgcgtcactgtcgcccgccggcaggtcgatacctcggatggcgccagcggcaaggccaagagctttacgagcctcgccccgtcggacggcagttcgtttgttggccaccaccagcaccgagcgtcggcctcaacacctgctgcaggcgctggcggtccctcgccgtggggcactggcagcgacggctgggctgcttcgaccgtctcgaccgctcggccgacatcgagtcgatctgcaacgtcctcaaacctcctcggaggcggcggcgaggtgccggccctggggacggttcgcgcaaagcgcgcgccggccgacgctgtcactgcccccgacgccgacccggacatggcggtgcgacgggctgccgaactcgcccgctcagccggcgggctagacgagctcctcgcgcgggcaaaggccagggacggcggccagtacctctagccctggcagacgacacggcgagacggcacggcggctccctccttatgccctttagctcgatcccactcgcacctgtctacgccgtactctgcacgctcggacgcctcggcatcgcgactctcgttggcccttgagagccgcacctcgctcatctatcgcactccatctcttggcgcctgcccattgcccgaggctcgaccaaccttacatctcacaggacgtttggaccctcctccttgcccttctttgcagcaacgtccttcctgcttcgctcaccctcgctagctccttgcaacaaccttaatgatggactttctcttctcgcgcgcgcctccccacctttcccctctcatcttctcacctcactttcctttcaacacctcgatcctcaacaatggacgccttcaccgccatcttcacccccttcgtcgcctcgtccgccgaggtcgccgcccccgcctcggccgcccgcggtgagaccatagcggctgctgccaggaatggcaactactgcgtcattgcttaattagggcagcgagtaagtccctgatccagtctgtcgagcaagcatcgagcgtatctcccgtctgacgccttctccgccccgcactgcctccaggctgcgctcctccctccccgaggcattctggcccccttgggcggttggtcggtggccggcgtgctcctggccttgcccctcgctcctcctttgtctcccggctgctctgcggcgctccggggtactcatgatttatgtctacgaccaccagccttccgtgcgcgagcgagcgactccttttgcctgagattggctggcatccccttccttcaccttccaggcagcggcctgcgacctcaggcgctcgctacgttctgtccttagaccctgctggccggcctgactctggtctgacatgctgccccctgcctctactcgtgcccgcgtccgggttcgaaagcaagcttgcgggtccggagccgacctgcgcgacaggccgaagacgtcacagcgcccagccgggccgtccgcgccgcccacgagtcggtcgcttgcctctgcctctgcgaagcccccgactgccatcacgctctccctgactgacctctcggccgacctcctggcccagctcctcgctctaaagcctctccccactcagacgactctcggcagtcagcaatctccactcagagcactcagcagcctccttgctccctctcctcgccctacctcccattcctctccggacacttcctccctctccacccagcaaaatgagctcgagccaaggcccgacgaaacagcgctggcggcgcggaccggaccagagccagccttcgtccagggacgccagtgaggaaggtcagtctgtcgtcttggatcgttggttgtcgttggaagaggcctcgagccacgaccgagctctgacctgctcccctctctggcttgtctcttgcagacaatgatgagtcgacggaaccgcctacgccatcctcgagctacgtcagcgatgcaccgcctcgggctacccactttcgctccgcaaaggcttcagcggtcggcatgagcggagacgccatcgcccgcgagtcctcgctgtacgacggtgacgtcggtgcgtgctcctgccggcctctgaagctcgtttccttcctgctgacgagctcttgctttctaaatctcgctcgtcagagtcttccggagcctcgacaactggctacgatgccccagcatcgtcgtctgctcatcggacgagctcgtcgctgtcagaggtcgtcgcgccggatgccgacgagacgcacgattcgcagcaccgggacgcacaagcgcctgccgtcgcagcgtctcccatcatcgagctccccgaggaggacatccgggcgtttgtccagagggcgctcgacggcgagtccgaggccggctggccggagcgcaacttcaaggtcaatccgccggcaaccgaccgaccggtccggatctatgccgacggtgagcgccagagggacgcgacttacctggcaggtccgagagtacaagctaacccttccttccaatccgctggaccgacaggcgtctacgacctctgccactttgggtgcggccctcgtcaccgacggctgtgctgctcgccaaggcttgcttgctgactgccgttgcacatccctcctacaatcatcagccacgcgctgcagatgcgccaagccaagctctcgtttccgtcggtccatctcctgattggcgtctgctcggacgagctctgccgggcccacaagtcgctcccggccatgacgcacgccgagcggtgcgcgtcagttcagcactgccgctgggtcgacgaggtcgtgccggacgcgccctgggaggtcacccaggagtttatcgaccgttacgagatcgactacgtcgctcacgacgaggagccttacacgagcgccggcaaggaggacgtctacgactttgtcaagaagcagggtcagtcgccgccagccgggcgagttggagtcttgcgcggtccagacgctgatgccgactcttatcctgcacaggccgcttcctcccgacacgccgcacgccgggcatctcgacgtcggagctgctcgagcggatcgtctcgcagtaccgcgcgggcgtcttcgatgtcaagctcgagaaggtcggtcgagccccaccttatttccccgcgcaagatccattgctgacagatatccacctgacttgcagattggtcacgccgaactgaaggccgaccgtgttcagtggaactctccgaagggttcgccctgagcatagcgtgcccagacgggcggagggcgcgatgacgaaggatcgatgcgactctctcatgatctttttgaaacctttcgcaacccgcctcgtgagcagagtgcagtatcgtgaagggttctcgaagaacagcgctgttgcaacggttggtcggcgcatgagcttcagagtccggctcggcttgctccgacagctcagcgagccaacaccgacgaccaccatttcaggccgcctccatcagccgagaagcaacggccgacgtcagcaagctgccggtgaagaactggacgctccgttcccccagctggtcagctcgcgtcctgccgtcaccagaaacgctcgctagagccgaggcatcgaccccgccagaaagccgtcgaccgcccgcctgtcaggcatcttcgtcgtatggccgagctaccaagcgacctgcgagacctcgtcggcgatatactcagtaccgatggcactcttggcatggctgcagccgagctgcgagacctagcggagcagacacaccgaagctcgttcgctctagcgctcgaggtcgtcctcccgctcctcgcaagctcgacctccacggtgcgtcggctagcctgcgcatgccctcgacagctgcctgacaatcgcgaggtcatcggctgcacttcaggagaggcaacgactcgtcgggctcttcgccatctccagcagctacgccgactacccgctgcacctcgacccctttcggtcgacttacgaggccgccctcgtccgaacgaaatgggtcagcccgcttgcctcctcgccccccgccaacccgtgctgacgtgtgagccccctggtgtgcccgacagtcggtccgggccgactctgaggcgctcaatgctgctgtgctctacatcttgtgcgggctaggtcaccttgtgcgtctgccgcctgatcacccgtcactgaggtgctgcgcttgctcaacgtccttcctccctcggggccgatcctcatacatcccagctggctgcctttaccgtcgaggacctcataccgttctccttgccaacgggtgggtcattcccgtgcggtgcaagcggccctgtcctaccggttgacacgcccggcaggtacgtcgtcccccccatccccctgctgccacttcgcaggctgaccagggtgactttcacacacattcagttctggagctgctgggatcgcactcgaagacgtcgtccggtgcatcagcaaggcgatacaggatgggcttcgacccggcgagcggtcactgctctcgaaggcgctgcctcgcgtcagccaccttctgcccggcctgcttctcccgggcgacttggctggcctcatccggcacaacgtcgacattgcgtgcagtgctctcagggctctcttcactgctccactcgatctatccgagggcgtcgacctcggctcgtacatctcggccttagccggcatggaggtcggcctatcgggtctcgacctgctggcccggcttctgcaagcctcagcggacgaaccggataatcggttgcggctcttggtcgagcaggaagttctgagtgtctacgtggcgcgctgggtggcagacatcgacggtctcgccacggtaccggaattgtaccaagagttggcccgacgggtccgcatcgtgcgggcaccctcctcctctgcagcttgcgatctgggactgatgcactcctgcctacgactctcaccagctctcgctctttgcagtcagcctgctcgagaccaaagttctcaggcctggcgaggacgtgacgatggagctcgccggcttcgctcttcgctattcgcgattcgcagacgcgcagcgcttgtactcgcatctcgcgactctgagcgactagccagcgtcggtcgtgatatctcatggtccagcaggcgcgtaaaagagagagtgtgtgagacagcagggatcgggcggcagcagagcctagtgatacaagggcagggacggcaacggggcgaagcaaagcggtggaggagagggcgatcgaaggggatctagaggacagcagacaaagcgagcgacaagagcgataccatcagtccctcttgaactgcaggaggggcgcaagtccagagtggtcgcaggcggtggcgaggaactcgtgctgagggaagcgcggcggcggtcagcacagaggacggagggccgggaggttaggcagtgacgcacatcgaggagctcggccgcggtcgcccgtgagcgaacgtcgacacaaaggcagatggcgaggaagctcttgagggcctcgctcaagctctctgggtccttgagcgagggcgtgccgttggtcgcaatcagatagagcgccttgagcggctcctcgtcaaggtacggcggctcgttctcaatcatctcgatcgccatgatgccgagcgaccagatgtcgaccttgggtccgtactccttctgcttgacgacctcgggcgccatccagtagggcgtgccgaccatcgtcgcccgcttcgacttgtcggccgagagcttggcgcagaagccaaagtcggctgcgaggaagcaggtgagaccagtcagcagctgcagcggacgtctgccgaaagcgctcgcgcgacgcactgatcttgacctcgcctgcgctgttgaggaggacgttgtcgctcttgatgtcgcggtggatgatggatcgctggtggagatggttgaggcccatgcaggtctgaaggaggaaaggcgggcgtcagctcttgctagggaaggagcaacagtcggaacggctcgcacctcgaggcagatgctcgcaatctgatcctctgcgagcttgttgttttcgataatgtcggtgagcgcgccgccctccatgaactccatcacgacccagagctcgttgcccttgatgaggaaggcgtcgaggaagttgacgacgttggggtgtgacgactccttcatgacgacaatctcgttgacgatgagctccttgcgcggctgctgggcgaggtccatctgcttgatggcgaccttggcacccgtgttgagagacttggcgaggaagaccatgcccgaggcgctagatcggcaggttgagaggccgtcagcttcagacggtcaatgggctcgttgggcagagcgacgcacccctgcccaatcttcttgatcttcgcatagacaaggctaggatcattcttgctgacgacggatcgcaacttctccatgatctgggcctcgttgagcgtgctgatccggcgctcgaccggcgcggcgacttggccggcagccttcgctagaggctgcgagggcgccacaggagctgagcctgacggcgcaggcggcttcgtgccgttgcgggccggagcgccttgcgaggctgacgatggtggaccctgcgagggctgcgacttggacggtgccgcggctggcggcgaggctctcggtgtctgcgcgatttaaggacgagtgagcagacggcatgtcactcgagctgcgcgcgtggtcgactcacgggcggctctgccctcgaagtcccgatgctcgagctggcgctcgttgtgctcggtaccgccgcgcgtacgtcacggaagttcatgctgccgccggcgctagcgttgggcggtggcggggccggtcgaggcggcgccgtcggctggaagtgctgctgctgctgcagttgcctctgctgctgcggtggctgctgtctctgttgcgacagcgacgcagagggctgtgaaccggcgaggccggttccgccaaagcgtgcggccggcggcgtgtcgacaacgtaaggcttcggctttggcgggacgacggccgcgcccgacgccgtgttcttctggccgtcaaaggggtcgtctgcgcgcttgtgaagatcggtgtagaactcgaggacgtcgagcacggcctgagggttctttgcgtaatcctccttcgtgatggccgaggacgtgaggagccgtgtccagtgatcaggcaggccctgcgtagacgagcgcaaatcgagtcagcgcgaggctcgagcgaccaggagccacgggtggaactgaaaacgtaccgtaaaagccccgctgatcgggtcaaagccgacgtggaccttgtggacaaagtcggtcggcatcgagacgccgagtggactccggctgtagatgtcgtccatccagccgtaaagctcctcgtccgacttgagcgcaatcagccatgtccggtccttggtgacgagctcgatcgcgtagggccgggtgtcggtcctctggacgttctgcacatcaggcatggggacgatggccgtgctcgtcgaggcgttcttcaggagcccgccgggaggagaaaggggaggtcagcattctggacgaggtctctcacagcgacaaagtcacaagatcgctgacaagcacgacgcacctcggacttgcggaagctgagcatctcgtcgtcgagcaccatccacttcttcgtccagagcagaaagttgtccttgacgctgaccatgcccgatcgagtcccgccgcccgagccatgcaggccgttccgtccgccagtcgcgctgccggcgccaccgttctggcgcgaggcctgctggagcgagatgagcgagtgcgagggcgaggcgttgcgcgagccgaactgctgaacagacgagttcgacgcctggcgcgacatcggtggcgttggtgccgctcgcgacggcgtaaggttgtaagacatgcgcaggaagtgtgcggggcgatccgaagggagagcgagtgggcgaggtgccaaagggaacgcagaagtgcgagggcgagagctgcttgaagagaggcgcgtggacgggtagacgtgatcagccatcgtctgcttccgcctggcgcggcctagcctcccgtaaagttcgtgagagcgcacctgggcggctacaaatgtagtagggcggttgccaggtgcgaagtgtcgggcggaggagctggaggcgagcggcggcgtgtttccgggtcgaagggaggccgtgcgcgtcgcttgggctgaagaggggctgagcgcgccgaggtgctgcgtgcggtggtgcgaacgggctggagcggcggcggcagttgaaacgctggtcggaaggaagcggcggcgacggggcgaggcgtgcagcagagcagtctgtcgcgaggtgatggatttgtccgtgggaggaaaagttgtgaggcgggaagggggagaagcggaggggctcaacgaggaggacaagggaaaggcggcgcgtgagagagacagagtccaaggcgcccgtttctggcctcgcagttgggttcccgcctcgaacatcgacgagtcgagcctccagcttcgtcccttctcgctcgcttcctcgccaccgcctccgacccaacgacaatgctgctcgacccgctcgactcagagggctcctctgggagtcgctcgcgcaagatctttatccccgctgacgacctcaaggccgagggcatcatcgccggcgacctcgtccgcgtctctgttcagggctcgcagcaggtgcgtcgggcactcgtccgtcggccctcgctccagctgacccactgtctcggctggattgccgctcgcaggcgtaccttttcctgcaggcctggccgtcaagcacgataccgagcaaaggtgcgaaaacgatcgtccggctagccctgtcgcggctccggctgacctcacctccgctcggctacgttcagtcggcctgctgagcccttcgcactacgcgagcctccagctgccgctctctctcgaggacggctcttcgacgtcggcggctttgcccaaaatcgacgtccgcaaggtcaacgttgccaagctctcgcccaaagaggctcgggccgtcaagctcgtcgaggttgccgccgccgccgcgtcggagctgaacccgccggctgggaacgagcagcaagacgagacgcccgctggcgagccgaagcgcgaagacgagtggctcgaaatctgtctcaagcaggccctaggtgcgtgctcgcacggtgtcgtgcaagatcagccacttgcaaggacttacggacgactacttgcaccagtcgacctgcgctacttgacgccagcgacgaccgtcagcgtcgaattgcctgacacgactcgtaccttccgattgattgaggtcgacggcgagcccctatcatcatcaggccatccgctagcagccgaggttggtggcctgacggctaagctggaccggctcgacgtcaacggggcgactggcaagcgcgctgcggatcagctgtggatcgtcggctggacgctgcagttcgagaccgagcagcttgagtgggccacgccctctacggcagagaatccctcgaagggcacaacggtgtctgctgggaacggtccggcaaagggcagcagctcggtcagtcgcgcgttatttgagtcgaatcggtcgaggacgcccaggtattgacacctcgtcttgccccttctcggactgccaagcctacttcgtcgactcttccctccttcatcaacgtcttcccaccctcgtcgacaccggcctccaattactcgacgattggcggccttgcctcgcaggtggcgcttgtccgtcagttgattgacctcccgctccagcacccggagctgtttgcgacgctctcgctccctccgccgcgcggtatcctgctttacggcccgcctgggactggtaagacagctctctcgcgagcgatcgccagctcgacgccgggctgctcgtgcatcgtcgtcaacgggcccgagctctcgggcgcttaccacggcgagtcggaggagcggctccgggccgtctgggaggaggccaaacgccgcagcccatgcgtgcttgtgctggacgagatcgacgccctctgcccgcgacgcgacggcggtgagggcggcgaggtcgagcgtcgcgtcgtcagtcagctgctcacgctcatggacggcatgggctcggccggcgaccgcgtcgtcgtcatcggcgcgacgaaccggcccaacgcaatcgatccggctctgcgccggccgggccgtttcgacaaggagattgagattggcgtacccgacgcgacagctcggttgtcgatcctccaaacgctgctcggccccgtcccgaacgcgctcgacgagcaggccctgacactcgtctcgtctcagacgcatggctacgtcggcgccgacctctcttctctcatccgcgaggctggcacgatcgcgatccaggcccatatcgccgcaccagccgagcgaccgctcgcgctcacggtcgacgacctgctgaaggcactgccgctcgtccggccttcagccatgcgcgaggtcttcctcgagccgccgacgaccaagtggtccgacattggcggccaggaggacgtcaagcagaagctcaaggaatgcgtcgagtggccgctccgctaccgcgactcatttcagcggctcggcgtccggccgccgcggggcgtcctgctctacggtccgcccgggtgctctaagacgctcaccgcgaaggccctcgccacagagagcggcattaactttctcgcggtcaagggtccagaagtgggtctagccctgtctcgacttgcattgctagtcagaacgctgactctgcaacggcttctccttcctcccagcttctcaacaaatacgtcggcgagtcggagcgcgccgttcgggaagtcttcaagaaggcccgcgccgcgtctccgtcaatcatctttttcgttcgtccctcagtgtagtctcagcgtcagcgacgcgattaacagctaacaatcgctccgccgtttctgctgcaggacgagatcgacgcactcggcacctcgcgcgaagacagcggctcgtcgcacacgagcggcatcctgacctcgatcctgaacgagatggacggcgtcgaggagctcgtcggcgtcaccgtcgtggccgcgaccaaccgaccggatgtcatcgtgcgtctgaccagggcttcgaaacagacctcggcaactgacagctaattcctttgatgacaggactcggccctgctacggccaggccgcatcgaccgcatcctttacgtcggcccgccgtcgctcgagtcgcgaaaggagatcttcaacatcagcctgcgcaagatggccgtcgaggagacgaccaaggccgaggatctggctgccctcgtacgtctctttcgcagttgctttttgagaggtgaagctgacgacactctggcgatcgacagaccgacggctgctcgggcgccgagatcgtccagatctgccaggacgccgccttgcgtgcgatgaacgccgacatcaatgcgccctttgtcagtgtcatccgatgctcgtcacgggtgtcttcactgacgccgttccctctgttttcgtgcgtcaggtccggcgcgacgactttctcgccgtcatcaagacgatccgtagatcgatcacgcccgagatgatccagttctttgaggagtggcgcgatcagagcggtggacggagtgcctgatcatgccagctgtcgttgcccatctcaaccttcctggacgacagcgtcttgaccgagagagaacgagcgagcgaaagtcaggggttggacgtcgggagctggtcgagcctggcaccgagcgtggcacacaaaaattgggcccaggcgggcgttaaccctaagccggtctcgcagctgcctcgacgacctgctctcgagtcgctctcgcagctcgcataccccaacctcacccgcctccccttctacctcagtctccccttttcctcaagcatgggcaagcagcagcagaggacaaagaaagatcgcaaggcggcgcgccacaacccggttcgcgtgcccgatgcccacctcggccacggcacgcccgccggcgcgactcacaaggccaaggaggaggccatcctgcccatcatcagcaaggtgcggcgctgtccttctcgagcaaatgttcctcctaacgcctggcctggttgaatttcgagctgcggctgacattccccccttgcttctgccttcgcgacctcccgcctccttctgcgcagctcgcagctcccgacgccgaggaccgggtgtgggcctgcgcggccatcacgaacctcatccagaatgacccggcgacccggcggctgctccagggaaagaacattgttggcgccctgattgcccggcttaccgactcgattgaagacgtcgtcgtcgagtcctgcggcgctctccggtgcgttcaaccgttaacaccagacgcgcgagcgcgcaggccgccgccatgtccgaggagctgcagctaacctcctcgtcgtccttgggtcctcacagcaacctttgcatcgacggaggctacgacctatgtgctgagatctacaacaagggcatcctttcgccgctcgccgctttgattcctcaggtcagtctcctggagctcagacgctgccgagcctccgccgtactgacgactttgcccccgcttctccagatcacgaccactctgaacggcatcttcaccgccgccccgctcgacctcaagaaggacctcgtcgagatccgcaagcgcaagctcgtctacgacctgtcggagaacgtcctcacgatcctctggtgcctctcgtgcgtcgcgcctttcacatccgagaatgctcgtgacctgggctgaccgtgcacgacccacaatgtcgcagagaaacgtcggacaaggcgctccaggccgtcaacaacctgacgctcgtcccgttcctgatctcgttcctctcgtcgcgcaatgcgctcccgctcaagctcgttacggccgcagcccagtgcctctatgtcctgaccgaagacaacccgccggcgtacaagcacctgcggtccgagtcaggctggatcaacacgctcgtcgaggtcgcgcgcgagggctgggagaaggccggcgagccgttgggctcgaagccagccaagggcaagggcaaggcgaccgaggacatggatgtcgaggagctccaaggcctcgagcgcaaggatatgctgctccggattctcgccgctggcacgattcgccacatcgcccccttgccgccgctgctgccggctgcggcgctcgaccttgacacgaccctcatcatcccgctgctcgatcaggcgctcgggaccgacctgccgcagatcaacaccgaggtcgtgcggctgtcagaggaactcgtgaggctcgctgccgaaaggttgccctgcgcttcgccaggctgatttgtcgcttcgcacctttgccccagcccgacgctgctgcgatcgctgcccagctgaaggaccctaagtcggaccacaagacggatgccgagcgggcacttgaggctattgagagccggctgacgacgcttcaggtcggcctcgaggtcctgcttggcctgtgctcgaaggtaccggatggcccgctcgacggcgaggacgaggaggagggtgagtgtcggtcgatcgctgagctgcaagaggcgccgacgagactgacgcgcttggtccgacgcagatgctaccgagcaggcgcccgtcgacgaggacgacgacatggaggccgaggctgaggacgacgacgagctcgacccggatacgctcattgccgagggtcgcgaccaggaggacggcgcatcggcttcgtcctcgtcaccgcttccgcccgtgctcgaggcgttcctcacgacactcaacctcccgctgcgacttcttgcgctgtccgccccgttggcgctttcgttcctgccgctcaacggtgccgtcggcgcccaggcgtcgctcccgtcgccgcacccgccgacgaccgccctcctctcgacgatccacctgcgcgcgctcgaggcgctcaacaacctcctcatctcgacgaccttttttattccggcaccgacctcgccctcgttcgcctcgcctgaatggcagtcgttctttggccaggcgcggactctgctccagcccgtctgggagcagctctttgcgattgccggcgcgattgcgcccgcggccgacgtgcttgacgtcatgggccaggaggtccgcaaggagctcctcgacgcgaccatgtcgtgcctgatgggcgtcgccggtatcacccgcggctcaatctcgctcgcgcccggccaggtcgagcagctgatcgccgcccaccagggcacgtcgcgcgagagcctccggacgcgcgtcctcagcacgctcggctcgctcggccagaacgacgtcagcgtgtcggatcagacgatcgcgaccaacaaggtccgtccctcaagtcgtctgctgttgagctctattgactaatgcctcctctcgctttggtttgccgacccagacgatcggcacgtacctcatcgcgctcctgaccgccccgggcggcatcacggccgattcgatggttgtcgtcctcaacgccatcttcgacacgtacgccgacgagaacagcccgtgggacgcgcccgtcttccgccagggcaattttctccaggcgctcaagagcagcgtgaccaagattcggggcatcgtacgtcctctcgctccctttcatggcatgacgccggccatctgctcaccgtcgaattcatcccttgctgcagacccgcgcggtcgacaagcgcaagaaccctgagctccgcgcccgggccgacgaggcatacgagaacctcatcgccttctgtaagtaccgccagggcctccggctctagtgcagccttatgacatgcaccattctagacgcttggtctgccgcactggcgaggctggcttgtagggcgagcggacgtcttccttgcgcgcatttacacctcgcgaagagcgacttcgagggctcggtgcacgccctcccctggccgacttgcccgtggcctcccatcagtttgacgaggtcggtcctgcaacccgacccatcggaagcgtacgtttctctgccgccgcgtgggtcctccggccgacgagccggcggcgggcgctgcggctgatcgggccccgccgaaggctcgcctttctgccgacgccaacgattgacaacttcgagacgcgacagaagcagccagccagcaagcaagccaggaggtgcgtggacggttgcctgccgaagccggtctgcgacccgcatctccgcaagagcgccggcgggctgatcaagccccaagctgcgcagtgtgccttccgggtctctccctcccttcccggcatcgcctcctccatcccatcgacttgcccatccgaccactcatttgtgactgagtcgccatgtacgccagtgcgtccattatccctgttggaggcggcatctcacaggaggctgacttcgtcctcggagcaggctggcaggccgacgcagctccggttgaaggcggcggcacagttcccccaccgcctccggcgccgctcgacaagggcaagggtcgcgaagtcgacgacctcccggcgccctggacgctgactgatgccggtatgcaggagcctgaagacgcccgcctcaagtcgcagagccagctccggacgtgcctcgagtgccgccggctgaagctcaaggtgggtgccgagacccggcggcatcgtctgcctccgtctcacccagctgctgaccgcccgcaccctcgaccggcctgccaaagtgctcgcgcgtctttccttgctcagcatgtattcgccgcggcgtcgcagagtgcgtgatgagctcgagcagagctgtcggcgcggctgatgctgacctcgagccgcgcgcaacccctttccggccgttgatgacagcctctgcccgtcgggcgccctccagacgaacgtcaacaagaagtgagcagcacttgcgctctgcatgcaggataccggacgctgactactttcgtcctcgcaacaggcagctcctcgagaccaacgaggtgaagccctcattgcgactggtcgtcgagccggagccaaacttgcctgaggactgaacagcctccctaacctgctgcagagcctacgtgcgcgcattcgggcgctcgaagagcagctggcggcttcccagctgtctgaaccggccatctcaccgagcgggacgtcgacctcctcagctccgacccaatcgtcggcctcggcctctggtcacacggctgagccgccgccgccagcgccgcgcgaggatcgtcgactgggcaagaaagtcaagcggtcggacggggaggcggcctcgccagacagtgaccggcactcgtcacagcatgtgccgttcgacgtcgcgacggtgattgccgagcacgatccgcgctggccgcacacgcaccacgtccatcggatcaccggcctgcccgtcggcgtcgacgccaactggccctactcggcccacccggagggaatcacgttcaacatcctcaaggcctacctcccgcctcgcggcatcgtctggaccctgagcggccagtactttgagcaggccggctggcacacaaatagtcggttcccttcgtttgcatggcgccgcgtcgtctcactgacgcctgtcgcatcttgcagtcgtcgctgcgcgcatgtacgacccgcagtacttcacgccctgctgcacaccgggcggaagcccgacctcgcagcagctcgccattgtctacctcgtctgcgcgatcggcgccctattcgaccccgagacggtcatgcagggcaacgagctcgcccgactctgcttccagattggccgcgcgagtctcgcgctcgacatgaagccgagtctggccgtcatccaggcgatacacctgatggggatgtacacgctcagcacgggccagagcgacgcggcgtgcgtgaacccctctcgtgccggcgctgcgcaagcaatcgcgagactgacgcctttcttactgtctgcagcggcgaatcattcgcgccgcttctcaacgtcgccatgaagacggcgctctcagtgcgtacctctcgctctgctgcttgctgcgatgccacgctgaacggctgagaaccgccatctcagatcgggctgcaccgagacggcagccattggtcgctcagcacgaccgaggtcgagctccgaaggaccgtcttttgggagatcaactcgctcgacctccaccagagcttgtctgccggcaacccgcgatgtgcgtcgcatggcgcctcgaacaggagagagatctcgtctgactcctcatcatccgctccactcgcaacagacctcaaggacgttcgcttcgacacagaaatctcagagcaagccaccgccgactcgatctgtgagtgggccggctccgtactccgagcgggcgcccctctgctgacctcttgtgcgctcggacgagctcagtttttgtctacaaggtgcgcttgccctcgctcgtgactcaactctcgcgcaccggctgattgccgtaacgctacgctactctccacagtatgaaatcctcaagctgatggccaaagtgaacgacttgcaagttcagagcacgctgccgacgcttcaagtcgtcatggagctcgatcgggctttgaagaaacgtaaattcgcatcaactagggctcagcgcaccagtccgggcttctgacccctttctgttcaacctgcagtccaagcaagcgtgccggcggagctttatcctggcaacagtcctctgccgccgtttgcagagcaggtcctgcagcgccacacactcgacctcatggtcagcgtcacgcagcttttcctgcacagcaacatgtttgcgcaggccctgcgcgaggtgaggctcgcggggctttctacctttgaagtgagtgagcgagtgtctgacccatcgcaatcgccagaacccatctgccccgctcgagactccctacgccccgtcgtataaagcgatgctcgaggcctgcaaggtgagaatcggatttgccgattcccgcaacgtcaatcgagctgactctcgcgacacaggcctacatccgctcggttcaaagctgcctagccgtccggcccaaagttatcctcagccagtggtgcgtaggctgctcacatagcttctctccgccgcccagacgctgacaaccgttgacgctctggctgctcgacacctgcaggtactaccactttcacgtcatcgagccctgcgcctcagtcgtcgccgagtgcatcaaggaggccggcggggcggcccatctcgacgccaagcggatgctcgaagagggcatctcggccttccgcggctcgacgcacaacggcgagctggtgcgtcggcctgctcaacttgcgcgtacgttactcaagagctgatgccttcctctccttcgacgccccaggccttgctcgagaagctgctggagcgagccctgcaagcgatcgaggtctttcaggcgacgagaggcgtacctctcatcgccggccgccgagacagcatcactcaggcgggcaagcaccgtctgcaccacggtctgcatgcctcgacggcatctggaccgtcggctcagggcccgccgcccctcttcgcctcgaccgcgactcgcctcggcgatcagacaccgaccgggcggcccttcggtaaccagctgccgtcgcagatgcccctcgcccattcgctgcgggcttcatcgacgattgcgacagcgcgcacgacggtcacctcgccgacgacagcgacagacggcgcaggaccggccgctgcgccatcttacgcttctgggcccggccagattccggacctcacgtcggccgccgttgcgctctcgcccgactggtcgctcgacatgctccagcctgtgccactctcgggcaaggccgagcaggcgaccttaccggcctggcctgacatgacgagtccagacctgaccgacctgatgtacgctccgccgcccgagatgtcgggcgacctcagcagcttcatctcgcgccagcagacgtcgcccgacgacggctttgactatgagcgctttatgcgcgagctcggcgtcacgtacgagacctgatgcatggctctgattttgcacgcattcggcgagcgctgagtctctgtgaagcggcgcgctcgtcgagcacctggagagagcgcgccctctgtctcgccgctagtgccaaagtcactcgcgtcttgagggaggagagcgctggccaggcccgcaggccttcgttgaagccttccgacccatcggaaagctgggagccgacgtcggcttcgcgcggcgcagcaaggccgcgacgttcccccggaccagcacgatctctcagcccgcagccggccggactcagggccgacccttcgcatcttccatggccggctcgatacgagggccgagcagccggcgaagaggctcgaccaacgcctcaagacggggactctcgggctcgcttcctccaacgagtcagcccaccctcccctctcttctcccccgcttcaccctacctgcccacccgcactagcttccgccatgcccgtctcgcttcagcccggagtcatcgatcctgagaatgtcaacgaatttggctcgaagaagatcattggcgtccgagctgccgtgcgtttaggttcctgccaagccgagccgctggcttgtcaactgatgccctcaccctccgccgttcagctccgagcgctcgaggatgcctcgttcgtgccatcgaagcagatcttccaggagttccagcttgacggccaggtcgccgtcgtctcgggtgcctacggcgggctgggtctggagatggccctctcgctcgccgagcagggcgcaaaggtctacggcttcgacctcgcacccgaaccgtcaggtacgtgccgagcgcaatcgcctctccatctcgccgctcaccctgcgtccttcgtcctacagtcgacttcaaggcggcggcggcgatggccaagcggctcggaacgacgatgacctacgtctcgtgcgacgtgaccgacgcagcgcggctctctggcctcgtccaggacattggcgagcgcgagggcggcatccacgtctgcgtcgccgctgccggcatcattggcccgccaaacggctgcccgacgcaggactacccggccgacaacttccgcaaggtgagtcgtgcaagaggtcttgacgtctccagtcgcgcccgctgatcgttcgctggcgacccgcaggtgctcgacgtcaactgcaccggcgtcttcctgacgatgcaggcctgcgtcaaggtcatgatcgagaagggctgcaagggctcgctcattgcgtgcgtccttatcgccagacttgacggctgaacgcagccaatgttaacgaaatgcttttctaccctcagcattgcctccatgtcgggtacgattacaaaccggggcatgcagcagactggtgagtgccgctgctactttccatttgagccgacctctttctgactgaccgtctctctcagcgtacaacacgtcgaagtcggccgtcctgcagatgtgccggtcgatggcgtgcgagctcggccagtacggcattcgttgcaacagcatgtacgttacctgtcctgtttctccgctttccgtattgaatgactgacccgttcatcctctcccctcgcagctcacccggccacattacgaccaaccaaacgctgcccctccttgcggccaagcccgagctcggccgggcctgggccgacgccaaccctctcggcaggctgggcgagatccacgagctgaggggcgtcgtcgcttggctcgcttcgtcggcttcgtcgtttgcgactggttcagatatcctcgtctcgggtgcgtgctctccttacgcgtggcctgtcccattgaatttctcttgctgacctcttgttaaacgaattgcaacccaggcggccaccacgcttggtagatctcgaccagacctagtgtcctcaccggctctagttttgcctgccttccgtactacgcagaccaggcattggccttccttcgcaggaagcacggcccaagcacggcaccgcctgtcggccggccggcgcttccttccccacgctcgttcacacgcagatcgacctcggcggtggaggatgtatctcttatggctgcttgctccagatgcgttgaaagcgtggggagagagacgcatgagatcggaaaaagagaaaggagggatgggcagtggtcatgagagtcgtctgtgagagagaaggaggcgtcaagggcgcgagcgtctagtgacgtgatcgtcggccgggtggtattacgtagttggagcgtgattgaagatgggcgcatcggggtgtggcaagatgcagggtggcggcgttcggtcggatgcggcgtgcagggcggaggtcagagaaaggaacaagtcgccggggtgggcattgagagttggcaaaaggcttcgagtggcgtaagtgactcggtgcaaggagagctagagtcgttcggtgtcgtcgagggttattggcgggagttcttgggtcggtccaaatgtgaatcaggctagagcggggagtcaagggagacacagagctggccgaggattgaaggcggaaagctgcctattctggcgcactccttcaggaacgtctcggagtatggtcgtccgaatctcgccggctcggctaagggctcgggctcgagctgtgcgtacgcgcacggcgggatcggtcgagctcgcggtcgtcatgccgctctcctcctccacggctgctgctggcatcaacgtgtcggacgacgagactggctcaacgccgacggtcgcggtcgcggtcgtagtacgagtcgcggcggtcggtcaggtcacggtcgtggggcgatgtgcggccatcgcgcataccgtctgccggcgagcgggaacgtcccctccctgggcatctcccttcggatgtcatcgagcgcggcggcgagagcgggacggctggccgagctggcgatgggttgcgaggagccggctgccaagggtgatattgctgtgcagcaattggggtgaacgacgaggagtggctagcgcgacgggcccactggcgtagagtcgatgaagggccggccgcaaggtgtcagtcgtatcgcgaaccagaaggcgcagggcgaataaccctggtcaggagtgacgccaaggggacgcacctcgatcgagatgcggttaccgtcaaagcgccggccgtgcctgaaggcacttatatgcagtcagcgttccagggcagatgagattcgcgaggggagagaggacagacatgtcgcggagggcgacctcggcatcggccgagtgttcgaactcggcgaacccgaacctgcgcgggacagagcaagcagagaagggagacagattgatttcccagtcagtgaggaaattcacaccgcgaaatcgtcgataaaggaggcggcggtagggtcgacgagtcttcagtgtcgagacggcatagcgagggtctgccggcaagccctatttggagtggggagaaggggtgtatgcgctcgcgagctcccgcccgacttcgccaggccaaacggggacatcgtcgaggagactgccagtacctgtcagatatgccctggtggctctgagggaggcgctcgtcgctcaaactggtgcgtgtgggcagagccgcgcgcagcagcttcgctcggccagctcatcgtccgactcgcatgccttcaaccctcctgggccagcgcaagtaaaggaggaaagtcggggactcacatcgtccgtgatcccgactgccggccggggatttcgaccctcacgagcgggccgtagcgctcaaattcccagccgaggtcgcgagcgcgcgtgaacgctgagaccaggcacgggtcgtcagccgagagatgcgttagtagatggtatggaagtgcaggcatcaagattcacgcgagaagccgtagacgaactgaaggcgtaagtgcaggacaaggataggtcgggtcagggcacaaaggcgacggacgagcgaggggcgagcgatcgagcgacgacgaacgaggacggtcggctggggttgtggcgcggggagggctcaacgtcagcctcgttctcccgagaaaacgacagcacccactctctggactgacagcatgtgacatcctgggcagcagcagccgagtctgagtggaggcaggcgagcgatggcaagaggaggggtcgagcggcaggagccgggagtcggcctggctgcctggcttggcggagtttgaaatcgaagttgacccggccgcgcgagccttgtctcctcgccctgccctacgtcgcctcgagctcaggcagcaagcagcccacaccaagtcacactcgcctcgcctctccctcccttccggctccctctctctccccttccgtccgcttcctacctcctcgtacacggactatggccgacgcagtgacggaccagctcgcccaggcgtcgctcgagattgacccgaccaagctcggcccgctctcgcacgaggtcatctcgaagcaggcgacgagtgcgtcctcctgtcttgtaccccagagcctgcggtcctgcttctggccgatagctgacctctcgaccaccgtccttgactgcttctctcagtcaacatcggtacgtcctccgcgtggcgtcgtacgggcagctgcgaagctgctccttcggccgaggtccctcgacctccgcagctcactgacgtcccgactggctcctcttccgaccgacaggtacgatcggccacgtcgcccacggcaagtcgacggtcgtcaaggccatctcgggtgtcttgacggtccgcttcaagaacgagctcgagcgtaacatcacgatcaagctcggttacgcgaacgcgaaggtacgtttgccccttcgttcgagtcaagtcgtctgcacgcagtcgtctgcacgcctgccgtcggaatgctaggggcctgcttcgatatgagcgcggaaatagcaggcagcaaaggcttccccccgggcgccgtctcggccgagcggtggcgaggcaggcacaggtgtacagaacgggtggcggggcaggtggaggcgaagcagagctcgtcagaagcaggccgactggctgacctaccttctccacttcccttcccgcgtctcctctctgtcttctctttcggttgcaaacagatctacaagtgccgcgaggcgtcgtgccctcggccggcgtgctacaagtcgtacccgtcgtcgaaggaggacgacccgccatgcgaggttgccggctgcaagggcacgatggagctcctgcgccacgtctcgttcatcggtgcgtccttggcatctctcttgcagctgtcggagcaggatcggtgggagcacggttcggaaggactccctgtcctgcgagtctgctgtagggcgatcgccgtcgcagtctgctggggccgcagagctgggtacagagggcgtcgttgggagacttttgagcaaaagcagcgctcgacgtctgctctgtcgcttggctggcccgtcgccgcggctagggttggagagataagagctagggctagcggtcgcttggaggacgggcgcgggcctgcgttccgaagctgcggctttcgatgctgagctcaagctgactcgaccttcatttccttgactccagactgccccggtcacgagtgcgtcttcccgcctcccagacatcctttgccacgatctctcggctgaccctctggctttgcgctcctttcagcgttctgatggcgaccatgcttaccggcgcggccgtcatggatggtgccctcctcctgattgccgcaaacgagtcgtgcccgcagccgcagacgtcggagcacctggccgcgctcgagctcatgggccaggagcacatcattatcctccagaacaaggtcgacctgatccgcgaggaggctgcccgcgagcagatgaccgagatccgcaagtttgtcgacggtgcgtcgttgccctcccgtgctcagctagtcgggcgcgcatgctgagacgcgaatcgtccctacagccaccgtcgccaagaaggcgcccattatccccatctctgcccagctcaagtacaacatcgacgccgtgtccgagtacctcgtcacgcagattccgatcccgccccgcgactttgcctcgtcgccgcggatgatcatcatccggtcgtttgacgtcaacaagcccggaagcgaggtcgaggagctcaagggcggtgtcgccggtggctcgatcctgaccggtgtcctgcgtgtgcgtttctgagcttccgaggctggcacgagtggcagacgactgaacctgccctcgctcgctccccccacagctccagcaggaggttgagatccggcccggcttcatcaccaaagacgacagcggcgcgttcaagtgcacgccgatccggtccaaggttgtctcgctctttgccgagcacaacgacctctcgtttgccgtccccggtggcctgattggtgttggcaccaagattgacccgaccatgtgccgggccgaccggctcgtcggccacgtcctctctgacgtcggcaagggcatggacatttacaccgagctcgaggtccagtgcttcatgctccggcggctgctcggtgtccggaccgagggcaaggaaaaggcgaccaaggttgccaagctcaccaagggtccgtccgactgcttgctcgcgcccactcgcccctcgccgtcgctgacttgcccgtctcgttcgctctccaggcgaggtcctactcgtcaacattggcgcgaccgcctcgggcgcgcgcgtcgtctcggtcaagtcagacatggcgaaaattgtcctccagagcccggtctgcaccgaggtcgaggagaagattgctctctcgcgccgaatcgacaagcactggcggctcatcggttggggcaaggtccggcggggcgtcatcctcgacgtcacgccggcatgagcgcgctcgcaagaacgagggtgtgcggccggctatagaaagaaaccacaacaacttacgttctcaaataagagtcgatgcttgagctgtcgtcgtcaggtcgagagcctgatgcgagcgaggatgctagggcgaaggagcgccacaagggtgcgagcgtcgggctgaaacggcgggaaaggggcaggctcaagcggccgagcgaaggctgagctgctctgcctttcctcccgaccaccacccacatgccgtgatgagcgcctcgtcgaccgtttcgctcgtctcctctggctcagcctcgggctcgctctgtcggtctgctagatacggatcgcttgcgaatgcaacagctgaagcccgctccctttggcggccgacgagcgcagacgactcgctctcgttcctgctcgcccacccgaacaagcctacgtcccgcaagcaggctgcgaggtaccggacgacggccgatctgatcgccgccagccaccgacaacttcgtctcggcatcctgaccgacggcatcccctctgacggcggcgctcatggggtgagctcgagcccccttctgctgggccgcgccccgagctgaccgccccctctcgcaggccgggggccgcccaccacttcgcccgaccatctggaagatcttcctcgacgtggccgagatctcggccgcccagtacctgacgctcgtagcccggggcaagagcgttgttcacgagaagagtgagtgccgggctgaaggcaattagagcctcctcactgctggctgacctgcggcccttgtcagtctccaacgacgcattccgaacgcttgcgaccgaccagggctttcggagcaaggtctcgatcgaggcgctcatccgcctgctaaacgcctttgcatggtcgcatggtgcgctccttggcctccagccccatcctcgtacccggctaaccgtgccttcgcagacaccatcccttacgtccaggggatgaatgtcttggcggctcccttcctctacgtcatgccaagcgaggtcgaggcctacttcgccttctgccagttcatcgagaaccactgcccgacgtatgtcacgccgagcctgacgggcgtccatcgaggattgcacgtgagttcctcgactcgcctttcgtctcttgccctgaacgcagcctgactgtcgctacagctgctcgatcgctgcctccaagtgctcgaccccgaactgttcgattacctgcgggccaagaatctccaggccgagcttcacagcttccagtcggtcatgaccctctgtgccggcacgccgcctcttgacgaggtcatccagatctgggatttcctgctcgcttatggcgtccacctcaacgtcctctgcgtcgtcgctcagctgctcaagatgaaggaagagctcatggcatcagcttcgtgcgtcgctgcctccgcgtctggtcgctccgtcgcgtgtgggctgacatcggcgtcttgtccggcaggccaatgaagctgctcgggcccaacttccctccgctcgagtcgcggcggatcgttgccatgacggtcctactcgtgcgagacctgcccgaggcgctgtatgccgagctcgtccggcatccgagggagggctgagcgcctggtgccagagaggattgagttgcggacgtcgaccaagggtccgatgggcatgtacccttgttgagcagttgcagcctgtcgagatcaccacttgccgtccttgaagttctccttccacgcgctctgtggctctatcccgccgtcgacggcgccctcgacgctcgcaccgtccgcgtagacctcgcgcttccagacctgcgccttcttcttgacctcctcgaggagccactcgcagagcgcaaatgattcgcgccggtgcgaggcgctgacggcaatgacaatcgaggtctcgcctgtcgggacgacgccgagccggtgcgcgatcgccaggtggtgaatagcggcgggtgggctggcgagggccggatgcgaacgagcggccgtcgcgatggagcgcagtgtcgccagacagagcggcacgtacgactggtacgcgagatgggtcacgaccttgtctgtgtgcatgcgaagagggggtcagaccaggtgtcctggttggccagacactcgaaacgcaccttcaaacgtatccctcgtcgtgccgacgaaggagcagactgcgccagcccggggatccttgactgagtcgatgagagcgcgctcgtcgagaacgtcgtgcgtcaggagcagacggtcaccctcggtggtccggacctcgtgcggcccatcggctgcctcactggaggccatctgaggcaggcaggtcgaggtcgaggcaggtcgcgcggtttaggggcaggcggtcaggctaagccgacgacgggaggtgggccgcccagagcgtaaacagtcagctttcagctcgtcctgacgcagcacagcagggagagcgctcacctacgttaagcaggcggtcttgccaggctgatgaggctgcaggagagggtgggcggctgaagggcacgactcggccgactcgtgtcgcccatgtccgcctcggctcgcaacgctgtcactcgaccctcaacatcgactcccctcccctcccctttgagcagacctgggtagtcgctcccactacatcatctcggacatggcctcgctgggaaccgttccgccggacgtgctcggtcagtcagcgagaagtggggcggcgagctcagcgcatgcccctccgcaccttgaggcagcaccaccggcctggtcgactgacccatagccgagccctccttcagagctcatcgcctaccatgctgccgtcggatcgaccgtccgaccacctaccgggcttctgtcgctgcgtacgtcacctcctcaggatcgagagggctttgtctgctgactcgctcgccaccacctcgaccgcagtgctcctcaaccgacgaacgcacgcgttgctcgagccggcggcgctacctcacctctacgcgtcgatcttccgggcgacgttcgacctgccagctctccatcgtcggatgccgccttcgcgcctaacgtcgcctagacttgcgctcgagctccggcggcgatggacggtgctgaagcggctgcgggcgcactcagcgacaggcacgaccgacggcccgtcacacgaggagacgctctgggtcgcccttctactctgcctcgagaacgacggtcggaacctcttcctcctccgcaactatggccagagcacacgttggatctcggccgtcgcaggtcggacgtttgcgcgccactcgcctggaacgggtggcgggccggccgccttcctccctgcacggatgcacatcgagccgaggacaataccgagggacacggtcgaggttgcgcttaccatttggctgttctggtacctccgtggcaagggcgacctccgggccgagtcccagaccgacaaagagcgcaatcggacgatgctgcgcgtcttcgtctttgcagcccagattgtgcgtcgccgcgaccgaaacctgaggaagcgcttggctcctgacagctccctgccctgccttcagttcgatgcccacctccaaccctggacgctggcccatctgccgctgctgcagccgtcaagcgacccgtcctctccctcagcctcgccgcgttcgccagagctcgaccagccgttcctcgccgacctgagccctcgctcagcgaccgtcaagattacctactttggcgacgagattgcacttggcaagcccaacgcctgctgggccggtatgatgagcttctttgcgcggacaaacgtctggcgggcgaccgaagccgaactcgacgacgatgacgacgacggcagcagtgctggaggcgatgccgacgacgatgatgctgagacgacggccgacggtggacctgcgccatcgagccccgaggcgtcgacatcttcgatccctgggccgggcgccggtttacacctcgcgccggagctgcttgccggctcgcgagactcgcttgcgttcgacatcgagtgggagcgccttattgcgtgccgcgaaccgtacgccgtcatcgaatcggagcaggcgggtgtagccgcagacgacgacgacgatgaccgccgagcgcaagccctggtcaaaggtcccggcagccgcgggctcggcatctggaagatccggggctcgtttcgaggcgtctggggcggcgagtttgcctttctcgacttcgactcgtaccggtgcgtcctccgacgagcctctgcacagatgttgcaacctccgtccaagctgaccggctcgccgtcccgccttccagggacatgctgagcggccgcgatcgggtcatttacgaaggcgcttttggtatccagccgcagatctttcgcctgactgagcggctcgtcctccgtcctcgcggcctcgccccgccctcgtcgaccgaccagacgcccgccctcaacgccttcttccccgtcgacttcagcttcccgttcgcccgggccgagccgacgggcgaagaggcgaccggccaagcaggctacatcgccgtctcgccagccgaggaggttcggctgagggagtcgggctcgaccgaggagatcgagcggctcgagattgtcctgagcgggaccggtcactctgcgtggggccggttcaacctctctggccgggtcaggctctgggacggcctcgtgtacctcctcaaggactatgcgcccgagagcagagggcggtggctctaccgcggctatgtcgtcggaggagggtcgatggtcggccgctggcgcgatacgttcagcccggtgcgtcgagcgcgagttctttatcagtcggtcgctgattctttcgcccccctctcctgtctcgctcaggagatctactcggggtacgagggtagcttccacatgactcgccggggctgagccgctgccgctgcctcgcgcgcgactgaaaggcagcaccgacaaaccgaggagcggtcatcctcgctcgacctccacccccatatctcccgcccgtaccctgtcgcctcacatgatagggcggtatcatcatgtctgtctgggcatggaaggagtcgtggcaggatgcagcgcgccagttggcttccgagcgagctcgaatgctcgacccgacctcagctcgcagccgctgccgatcctgacgatggcggcggctgactgtccaccgccgggaccgccgcgccgggagtgacctcgacccggccgatgtctggcgtcgggctctttgaccggacgaagcgttcttccggctcgtcgtcgggcccaggcatctcgatgtcgtcctcttcccgcggccggatgcgagacgtcgggggcgtcagaggcgtccctcccgccgtcgtcgtggtcgtcgtcgtgaaggccctcggggagctagcgagcaagtgcgcatgttggtttgcgccctcgccctcgtgcgcggccgttgacatcccgccgggcgaggtgccatcgctcgcaccgccgacggccgacgtcaggttggtggaggatgagctggaggggagggcgaggccggcgtcgagttcgtcgacgatgagctcgtccgaggacagcgtctttggcgcgtgaccgctgctgccgtcggcggtgacgggtgtgggtagcgagggaggagcggcggtgctgcttgagctcgatggagggtcgatgacggccgtcggcagtggcagggctgggccggatggaggggacgagcggatcgggagcggcgagccgagcgacatgggcgacggcgccggctcggcagcaccggcgccctcgagctcgtcgcgcgcgaggaatgggatcgggctgaagagcggcgtgccgacgctccaggccgtcccgcccggtacgaccgcatgtggcgtctcgccgccgattcctgtcgccgacgtcgaacgcccggcagatgagccgcctggaatgacagacgccggcggtgtccattcagaatggacgtcgagcacgcggaggatcgctcggaggtgcttgccgagcgagccgtgcgacgcctccggagcagagacgagctcggccaggcgctggaccgtaaagggcgggttgctgtcggtagcaggaagaagcctgtcagcatcgaagaagctcgcagggacgaggaaacgagggcgcacctctcaaagctgtcgagtagccgaccgatccgccgttcgagcacgtcggcctcgtcgcgcgtgatgtaggccggcagcgtccgaccgccaatcagccagcccgggttgacacgcgcctcggccgtctcttcctccggagcaggaccgtcagtcgtcgccggctgtccagagccggctgtcgcggccggctttggcgctgatggacgatcgtcggcggcctgtctcggccctgcgccggaagaggggccatcctgaacagctgctggtgctggtggaccgatctccttcccttccgcgcccgactggcccgcacccgccccaggagcagaagcggccgcgaccgttccagcgcgcgaggcagcgatcgcctctgcgctatgcgacggctgtgccaggaacgcctcgacgttgagctcgaccttgcgcttcaggatcgcccggagcgtcggccaggggacggcaaacgtgttggccgcgacaagtgaggagaggacggcgtcgtgctcagctgaccaggggccgaggactgggtcgctgccgttgactgaagtggcggccggggaggagtggacaacgtcgagcatctcgccctcggcgaccgcccctcggagaggcgccgtcgagccgtcgacggcgctcgtccgagcgtcttcggaggcagtagtcggagatgaggtcgaggtgacgtccattcttgcgaagcggaagagagtcggagtgggctggcctgttgctcgagtgagagcgagggacgcgaaggctcgccgcggggttgaagtaggacgcgctagctcctgggaagaggttaaaaggagacccggcgcggtcgagagtgataaggcacaggcagagccgatcggcgagcgtccggatgggtcttcccgtgcgttgcgtctgagcgtggatggagagcagcaggagggtgatcaggagcaggaggaggtcgtcgtcgttgcctcgacgcagcggagaggctggccctttgggttctcacgctcagagagcccccgccgtcttgcgccggcgcgcggcgccggctcccgacgttccgacgtcgcttccctctgcttgcgtcacgcagggcgaccgacctcttgctcgtctcgctcgtccagctcgcctacctcttcagcactcgacgtcggtcacggctagagagactgctcgcctgacaggaagcgatcaagagcccgtgaacgcgctttgagacgaggccatcctcgaccgaagccttggcgacaacgctgacccgcaaccgacagacgcctctaaatcgcgcccacagcctcgctccctcctctcgcctcgcctcgctcgtccgacctcgatttgcttcctccctgcccagcactcccctcgaccaacatcgccgagagctcgctctgcccttcgccctcctaccaaccagcaagtctttctgtcagcgagcagacctctcacgcctcgctcgtcagccccggccatcggccaacgccagaagcccgccgcccccgccttcgccgcccgccccgttggccgcgcaggcttcgttctcgccgtcgacctctcctcacaaaggccctcctcaacgtcgaccttctacgttctggatccagcgtgcgtccttccctggccttcctgctcgtcaaactttcgtctgacgacgagctcgccctccctcgtttgctcggctcacacgcgcgcccctagtcagccacatcacatcgcttctctccccctctctttgcgcttgcgctccctttcatcccttcggtgcgcaagcagctcgtcagcactcctcctttaagcggcccgcctcgcaactcgactcgtccgccagtctctcgctcgcatctcgagccctcggccacagctgccacacgcgcgccatctggtagctcccgggcttccgccgcatccaccccctttcgaccgccctcctccgtcatcaggctccgatgcccttcctctcactcgcctcgcgcccgccgccagcctcactcggccctatacccggctcgggcctagcgacgccctccgcatcgacagcgtcggcggcccctttcgaaagcacgggcggccggcgcaactcgcgcgcaggccagacaacgatggggagcaagggctcgccgttgctggcgccactgggggcggcggtaatcccaggcgctgcggcggagtcgtctttggcagctggagggggcgagggcggtcgtcggaggcaggctgcggctgcgaagggccgtcgacgagcaaagggtggcgcttacgaggtgtgtctctcactatgtggtcgacagcttgctcaggaacttagacactgactaccttgtgtccgcactgcagacattcgtctttgttcggccgccgccatcgtccaagacgaacccgatgaatatccaatgccagctcgtcgtcgctgcgccgccggccacgcagacccggaggatctcggtccgttcacctacttggaattcctccatccggacctgcctcctgatgactccttgtgctggcttctcgtctctgtctcacaggacaactcgctctcgacgacgacctcgcgcctttcgactaactcggcctcgaccggcatctcagaggcgactggcggcagcggtggcggcgacggcggctcccttctctcctcggccggcggcggtggctctaacgaggccgagcggctcctgcggccgctctcgcgctctgtcagcgcccgctcggcctgctcggttgagacgaccgcgtcgtcgatttcgccctcggtctttggctcgacgagcgtcctctcggacgcgggctcgctccggtcgaccgcttcgactggagcaacgtcgctctcgtcgcctgcgaccgcgggagcaggcgcgtttggtctgacgcagtcgtcgagcagtagcagcggcggcggcggcgcggcatcatcgaccgggtcgaccaagcgcgtcatcccgctctacaacctccagttccacacggtccgccagacggccgtagccgacgctgggaccgacgcaaaaattggcgtttttcaaaagcgggcgctcgagctccagggcctcggctcgctcgagtgctgcgagatggcgggaccgtacgtcccggcgcaggcgtcgtctggggccagcggctcggtctcggtcgtcgccgacaatggcggtgaggggatgaacgacctctcgtcgtcggcgaccgcctctccttcaagcggccgacgcctcgccgtccctctcgatggcgtcggcgggtcagcctcgccccggctctcgctcgacacgctcttcacccgcccgtcgttcgacgacgtccggtacggcctcggcggcgcttcagccggctcgaagggtgccggcgggccgagacgcgggcttggacaggttgcggctgctcctgctccgactggcttgggcaggccgaggtcgacaaacggcagcatgggcggcggcggtgaggaccggggcgcgcaagctggaaacggtacgagcggcgtcggcaagaagatggtcgaggagactgcacaagccggccggaagctctttggccgcctctttggcggcaacgctgggccgaacggctccggcggcggtcggtcagccgacggctccgtcaacggcggccagacacaagcgagcagctcggccgcgtttggacttggcgcgatcgcgaatgacggtcggccgggctcgctttcggccgctgggagcgaggcaggcgggcgggcgagcacgagttcgcgcagatcgtccacgacgacaacgtcggacggcggtggcggactccctcctgtcggttcgccgtcgaccggccagcggcctgccaagcgctctggcgtcgttggcgcctttggtcggcctaaatcgtcggccttctcaacccactctgcgacgagcgcatccggctccgtcacgacgtccgctgccggaggatcaggagcgtcgacgtcgacgtcgaatgcggcgaccggaagtcagcaggcggtgccgtacctcggcgcgccaacgctcggcctcgcaccggtcgtgcggccgccggtcgatggcggctcagccagttgcaagacgagcgcctacgtgtgcgtcgcgccccgctgatcgacagcggctcaaagctgaccctgttctgtcgtccacgcagctgggtcatcgccaagtgggccacgccctcggacggctggtccttcgccgccctctctgaatcgctcacttcgtcctcccacgccctctctgctgtcctttcgcctcattcggctggtcaaccccaggaacaacagcaacagcaggtcgggcaggtgtcggccggagcggagagtcagggcgcgacgtcagtccacttcgagtggcttcgcggtcggccgcctgctcgggccagggcggcgggtagcggtacgcaggctgcagctggcggaagtagaggtcggtcggcgagcgtccctgtcggaggtgtggagggagggacggtggtcattccgccggtcgtgcctgggaggaaacgctcagggacgacggcgaccgtcacgtctgcctcggctgctgctgctgctgcgggagcggaggatcacaactccgacgacgtggagcctgacgccgagtacgacgaccgccagtcgaccaaagcttccaccaccggcgggggcgtcgatgacgacgaccagccggccgactgcgccgacgatgacgccgacgacgacgaggacccggaggactcggaggtcccctggctgtgctatgctgtccggacgtcgtttgcctcgccgaccgcaagggcagaggtcgagcgggtgctgcttgggaagctcagtccggctccgcatcatccgaagagtgcgttcgctccctctttggccctgactcgcgcgatcagaatccagctgacgttcttacctcttccgctctgccagttgtcgctcagctccgcatgcccttccctctcgcccccatctccctcagcaacaccaccaccaccaacaccaccagcagcctcgacagcagcgccagccgccagctcacggccgagcagctgaaagacgtcgtttgcacgaccgccatgtttctcttcgtccgcgaggagtggggcggcgttgggcggaggcggcgttgaagggggggggctcgcgcttgcatactcttgccctcgctctgagcgtcgatcgatgaactctttcccgcccacccgaagcgcgagcgcagacacccgcgagcagcattaagcggaggagcgtgcgattgcagaataagaaaagcgaagagatcgtaggaccgagaaggagagcgagagtggccgagaaggaatgcaagcgcgatgtggtgggctaccgatcgcgtgtccgctccatcgctggttgcacggggaaggagagggttgagtcagtctttctcgagaaggctttgtgaggggtggggggaaggggaaagggagacggacggttgtagctgttgagacggagaaggtggggaaaggggtgtggtgcggatcaggataagtcaactggcggaacacaacgggacaaagctcggctttgaaaggtgctagaggccgcccgcgcgaaaagatggaaggaaaagacggactgcaggagcttctcgatcaagtcctgcccatcgcccgcgatacagccatgtcagcgcttgacttccatacgacaaacgagcgccccgcgggaaggagagaagggagggacggacgacgtgcgtgaggaccatccggcggcagcagtagcgcttgagctggaggcggtcgagcgcttcgctgatgcgttgaaaggagaggggggggcaggtcagtgtgggttgcgcgtagcctgtcgcttttcggacgggcgagcgaaggggagggggcaggtcgtcgtcaccctggacggacgaatctgacagcgcggctgggcctgtcccccctcgctcgctacgagagcgaattgaagggccggcctgtgccttcaccagctgctctgcctcctcccgccgagcccgtgcaaccctccccctccggccacactcgactgccgatcctcttcgagcaaggagcacacgaccccagccgttctaccccagtccatcagccgcgctcgaccgccccgcccctgcctcttaccctggacgggcaggaagctagaccaagcgagcgacgcctctgaaaatccacgcgtggcgggaggtacccgcctgcgcgggccgagacccaggcgggcgagcgagcaaagcggcgaggcgctagctgctacgtttctcccacgccttgggctggtgttgactgccgccttccccccccccccctctcgatcgtagagactctagactcgtcatccacactcgttcgctcctgcttggccagcccacccagcctcctagaaggcccgttccactcctgagcttttcacttccgcccctcgtacgacgtaaagcccctctctaaattctgtcgatgcctcgtcgcgcttccgacacggccattcaggagcggcatgcaggacgaagggaagaagggacagcaggtgtagcatgcgatcgtgcaggggagaatacaggcaggtgcgtaggggggatcgcccgcggccaactcagtcgtcgccctcgactctcgactgaggatgggagggcaagtcagcacgagaacgtcacggctgcaggcttcggtaccacgagacgcacctcgaaaaagaggctgtccatctcgccctcgtccttgtcggcgagcgagatgctgcccttgagctggaatccctgcacgtagacggcccgtagcagatggagatgcagcaggcgcgaagagatctgctgcgaatggctgtgtgccgaccctagagaagtgcagaggttgcgtcaggagggagtcataagccagaggacgacgaccgcgcagcggccaagaatcacatggtgtgccctttatctgaattgcccagcagccgggctccttgctgagcggcccactcttctggacgccctggggccaggcatagccgactgcctcctcgaccgactcgatcaccgcccgcggggcgtcaatgatccagatcgtgtcgtcgtcctggaacgacatgctaaagaactgggtggcgatctgagagcagcagagggggagtgattcagcacgcagagtttctagactgatatcgagggacggaccgtcgtcggcggccgctcgatccgcttcaggtagagcgtgtccttcgacgagtctttgaaggaggcgtcgatcgatgctgcgaggacccacgaatgctgcgagagcgtcgagagcagctgcgagatgagcctccggacagcgacgccgcctcgggtgccacgagcgccccagacgaggccgtttaggtggcactcccagacgtcaacaatcgtttcgccgccgccgagcttgccgccgccgacttttggcgtgccatgcgacgagacgccctttggccacgaagtccggaccgcctcgatgatcggcacgtgcagggaatgcggcaggttgatgaactgaaggacattcgtcttgctgaacgcactataggcggacgagagggtggaggcacgattagtttccgacgtgcgggtgcggcggcgacgggtgcgatgacgattgaagccaggtcgggacgcacacgatagcatagcagcacgactggccctggaccttgatactccggcagccgagcgactcctcgacctcgtagtcgctgttgaggctccgcgtcttactggcgccgttgatcgaggccgccggcgagctgccgctgccgacgacgctcgtccgaggtgtcgaggcgccgctccgctggccgtcaacgagctcgttgtcgacgctcgaggagctggccgagctgacggttgacgtccggaggattgacttgaggccggtgctcgaggatgaggtcgaggcggatgaggacgacggaagctctgccgatgctcctgttgctgctgctgacgaaggtgtcgaggtcgcgggcgagagcgtcagcgtctcgagcttaggcgacgagctgctgctgctggccgacgaagtcgaggacgagtgatggtggtgcttgtgctgcagcttgtgcaggagcgacggcatgctagcagcgactagcttgcggtcaagagtaggggtgaggttgagggagcagaagcagcaacctcgggcacgtcgggcacgtcgggcacgtcaccaggcacagcagcatggtcagcaagccctcgacgtcgacctttcagccatctcctttcactctcgattggtgtcgtggccggtctcttcgttgacgcaggacgtctggcgttcgtctggctgactttgcttgattctcggacgggcagggaagccaccagctcacgcagccgaagccagtctgcccacgcagagagactcggagggagcgactgacggcgcgtctcaaaggccgcccgctcgtcggcaggttagtcgacgccgcaaccctcctttgccggctcacccgtcgcacgatgcctttacccacgtactgctatatgcgacgcttcattgcagcacgttcgaattcgcagggttcctttcgcttgcgggcctcgtcgtcgcagccgggcgacgcgtctggcgcgacctcctcatcggagctccctcctcccaattgcgggagaccaatctatttctagccggccccgctcgggagccgacgaggccagcaccggcagcggagagcgacggctggccgcgtgcctgccgagacggaacgcttcaacaagagcagctggctggctcgcctcccttcgatccaccagcacccgataccccctcattccaacgcctcccccctacagcatgtggctacgcaagaagcaggatcttgaccggcatgacagtgccgacagctcgcagccctccgacgatatgagagcgatcgcgaggaccggcggactcggcgcgaagtcgttgatcttcggtacgtctcctcctccctctcgtctggcttcctcctatcatcgactgacctctagcttcctgctctcttcagcttgtggcgcggcactattcagtgatggctttgtcaatgcgggaatcggtcctgtgcgttgctcccgagtgccgcgatggtaaggccttattgacgatcggggcgtgtcggctgacgcctgctgctttactccttggtcaacaggtcaacactatcctccgcctgctctacccggaggaggtcgccaacaccaattgtgcgtgttagacggaaggcggcgtatggctctaccaacgctctgcagctcgactgagggggctgatgacgactcgctgtctttctcgtcggtcaatcagatggccagcttctgtcgtcgatggccttcgcgggcacgattgtcgggatgctcgtctttggtctcctctcagacctcatcggccgtaagattggcatgctaatcgcggtgcgtcgttttacgtcttcgccaaatcacggttcgtgcctctttctgacgccctggtttcgtctcgccggcagacggccattatctttgtcttcacggcattgtcggccgcgtctaagggcgctggtggctcgacgaccggcatgctccaggcgctcatcgcctaccgcttcctgcttgggtacgtcgcagaaccccaagctgagacttgctctaggacgacctgactgacccctcgcctgcgccgcctcccctcagcatcggaatcggcgctgagtacccgtccggttcggtcgcctgcagcgagaacacagaggccgagggagtatcaaagacttctcagcagatgtggttctcgctcgccactaactcgatgatcgaccttggctttgtcgccgcgagctttgtgcccctcatcatcctctggatcgccggcatggaccacctcccgctcgtctggcggctgtcgctcggcctcggtgtgatcccgcctctcgctcttcttttcttccggtgcgtcctctgcgtcaggcctttcaaatcagcacgcggctccactcttctcccgccaccggcccggccttttcctccgcctgacgatgatggatccgctgatcactctactcactctcgcgctcatcacagggtcaagatgcacgagcccgagtcatttatcaagaatcgtcagtcgtcggcagttgtacttgctgcgcagctcctgcgccccgctgacctcttaccgtgtccaccagggatcgagcgccgcgacatcccgtacaagctgatcatcaagcgctactgggtcaagtttctggctgtctccttcagctgggccttgtacgactttatcggtaagcagatctgcgaccgcttgagtccagttgaaaagggctcgctcatttcgcctcccgctgctcgtttcaaaagtctatccgttcgggctctatagtagcgtcatcatcgccaaggccgacaaagagtcaacgctctacacctcgctcggatggggcgtacttgtcaacgctttctacctcccgggcaccctcatcggcgccatcttcatctcggaccggctcgggcccaagtacacgatgattggaggactcattatgcaggcgacaatcggatttgctctctccgctgcttatacgcccctgacggaggccgacagcgtggcaggcttcgcaatcttatatggcttattcctctcgatgggcgaggttgggccgggcaacaacctggtttgcgatctcctttctgaccgccctttttgcgcgacactcgagctgaccttcttttgaacctctctcgttaacagggactgctcgcatccaaggcgatcggcccgacttgcgtccgaggccagctttatggtatggcggcagccatcggcaaaattggagccttcgtgggcacctacgccttccctaaaattcaggccgggtgagtcgaggctgctcgtcggcggctcgcacggggctgacaatgccagccgcacgccagtttcggagctgtcgactcgtacaaatacaatacggggccattctggctcggcagcggcctggcgctgctctccgctctcgtcatctttctctttgtgcccaacattggccccgtaagtcgacccaagtcttgtccttatctgcggctgctgacaggcggcgccctgatcccttcccaggactacatggagatggagaatgccgccttccgcgcgtacctcgagcaaaatggctacgacacgacgctgatcggcgccctcgtcgacgccgtcgacccggagcggctcgacgtcccgacggccggcaagaaggccatcgacgacaaggatgtcgtcgaagaagtcaagtgatgaccgagctgtccctcgccaccttcggcgtcagcccttcaacaggccggtctcgggtgctctcttaaagaccctccgccgcggcgcgcagatctccaccttcctccctcctccttccggtcttcaactcttgtgtccgcgcctgctcagattgcatgtatatcccttctgccgccctgagcgtgccagagcccttctaagcagctgctctcggcgggctctcccagctgacatcctcccagccgcctcggacccagacattgcgcaccttctgctccatctccttgcgcgcggcattgtcgcctctgcccttgttgacctcgcgccagacacggaccgcctggtggacctcgtcgggattcttagcgccgatgacgacgggtacgacgctctgcttgcccgccgagcccggcaaggggatgttgcgcaggccgtagccgagcgcgacgtctgggagcccgccgggccaggtggcagcgacactagccgcctcgcgcgagacgggcaggatcgaggcgttctttggatctgagagggccgggtgccagtcgggcgcgccggaggggacgagcaggcccatgttgagcgggcttgccgtcaagagccggcagcttttcgggaagtggggcaggtagctagcgaacgactcgttttggaggttcgagtgcgagtacgaaaggatcgacgatggcgggggcgagagcaggtgcgacagccggagcaggcacggcagagggtagcccgagatgccgatctcgcggatgagaccctcgttgcgcaactggacgagcacctcccaggcgccgagaacgacgtcgtcgcattcgccgagcgaggctggcttcgtcgctgatgctgagccgaggctgaggccggcgagagcctggccttcgggctcgaggaacgacagcggcctgttcgtcttttgcagcgctggtgtcatcgagcagacaaactcgacgtcgtgcaagtctgttggacgaaagcaggaggcagtcagccgtcggtctggttaggcaggccggccgaagaccggccgagaagcctccgctcgggcgaacgcacagacgcagtcgaggtagctcgtctggagccgcttcagcgaccgccggactgaggtctcgatgttcgccggcgagtagtcgaagccctccgagttgtagcggccgcactttgagatgagcttgtagctctcgcgcgggtgctcggccgcgagtgccgagagggcgttgccgaggacgatctcggacgggtggtagctgcgagagatgggagcgctcgtcagccacccgcgcccggtcctgcgagaatggcacgatgtactgaggcgaggtgtcaaagacagtgatgccatagttgagggcgaggcggaccgtccgaatcgggagtgcgagctgctcgggcgtcgagggcgcgggcgagtagatgccgtgaccaaacgtcgcgcagccgagggcgagcgggctccatccgtcggcgtcctgtaggcaagacgagggcagagcgatcagcatcatgtcgtcggtgagccgaggcagttgggggagctcacgagaggcagcctgcccgatgcaggctcatcgcgctcggctggggcggcgacctgcgggatgaccgggtcggggttgcgggggtggatgccagacattgtgcgagtaggccagagtggttgagcagttgactgctgacgcaagaggcggaaaagggcgagtgtcgaggcagatgggtcggaggaagcgagcgaggttcgggctggtcgccctccggcgtgggctgaagtctggagccccgcagtatctcgcgcagcagcgcgccagagctccggccgcctccagtacaaaagggaaggcccggccgcttttcgctccttccctcccaaccgcgatcccatccgtgcgcccggaccatcatcttcccctctgcctctccctcccgcctgacagcctcctcttcctctctttcgcagcagaccaggcagcccgaaggctgccctgcgctcgccgacccacttgacctcgctcggggacgccctccctttcaacggggcgggtggctctcgtccggcgtttcgacctctcgcgagaccgcccctccgagccttccaccagacccacgcaccccagcgatgaagacgccggcctgaacctgcgatcgggtctcgacccttgatccaggacagggcgtctttgtcgctgcgtctcttcttactagagaggggggcgacgctgcagacactcgctcaccaccctgcgcggaaatctgcgtccctgctggtcgattcgtggttttctaagcgccgccgggccgccccctcagtcactgcgagggcccatggccctccgtcaggtcgtcgttcgacctgataccccatcacctgccaaacctgcctccgggtcgtctgcctctggatcagctcttcagccgccctcctgcgtaggagctgcctgccgggcctcctcaacctccccccttcgggctcgcctccgggccgcctggtatttccgacctcaatttcaccgccggacgcaaggagacaaagatctgcacctgccggtcacctggtcgccgccagagctgccggtgcaaggagtctctcttcatcgtgtccttcgggccaaggaccgcgcagaaacaggtgccttaagcgtcgtcgggtgcctgcatcgtttctcgtcctcgctctcgtccctcgccctcgggcagggaacgagatgcgtcgacttcgaccttagacatgcatcagcagcgccgcgctcctccgaaagcacggtacggctcacttggagagaatttctcggactgcttgggggatcgccttccgggcgaggtcggccttgtgtgctcgttgagtatgcgagactggcctttccggattccggcactgtgggcgagtgagtcgtgatcaggtcagcctctcggccaggccatgtctatggtctgccctgctgagcgagcagcagaacctcctactctcacgcacactcgccgtcttcctgttgtaggcgtggagatcagcaaatccgggtcgtactcgacgcattctccgccgcagcagctcgctccgccgccgccgccaacgaacctcgctccagtcgccgccatctcctccctttcaaccaccgacctcgacccaccaactcgatcttccttcccagaatttcaacatggtcggtccgacctttgctcgctggagcttttgctagcctttgctgactcttaaccgatcgaccttcccaggacaacttcatcaacgtcggtcctctgttctcgcctggagcgtcatcgagcaacccggtgtccttgctgaccgtgctgacctgctcgctccctctctgcagctcgccaagaagggctacgaggcctactctgactcgcagaagcccgccggtggcaacggccagcagcagcagcagcagacgccgggctcgtacggcggcaacgaccgtccgtctccgcctgctctctagccgcgtgctctcgtcgttttctgacgcatctttgaccctcggccctcttccacagagtttggtgtcaccggaggagctcagtacaaccggccctcgggcgacaacagctacggcggctcatcggggggctacggcgttcagcagggcggcggcccccgcgttgaggacgaccgtgcgactctccttctcccaatcgaccctgcgccgcgcaacgagctgatcgaccgcttgcctgaattctgccagtcgacgacaacgccgtcatcaagaacgcccgcaagcaagccgacgaggacgacgacgacgactcgaacgactcgctgtgcgtcccgcagccacgcccgccccagccccagcccgcacgcatcatcgacgatcgccgctgaccccttcggcgcccttcccatcgcagcttctcgaacgccctttcgtttgccaagacgcagttcggctccggctcggcggccgcccagcagccgatcgacgagtcggctgctcaggaggcgcacacccgggcttatggccagggccaggcgagctcgctcagcacccagtcgatgggcatggctgctgccatgcaggccatgaagatgttcactggcggccagggcgcggctgccaagcctgccggcggaaactcgcagtcgcaggtcgtgcgtccatctgatttgtcctgttcgtcttaaagatgaccgatgctgacgcctctgccgtctcgttctcgcagatcggcatggcgctcgcagaggccaagaagctctttggcgcttccggcggcaagacggccaacggcggaaaccagcaggacgtccttaactctgcggccggcacgctgatgaaggtgcgccctgttggtcgctctccgactgggtcgagctctagctgacagaccgaggcgatacccctagctcatggtccagagcaagatgtcgggcatgatgggaacgggaggtggcgccgcgggcggcatgagcggcgccgctggcggtgccggcggaggaggagccggaggcatgctttcgagtgagttgcccgtggccagcgaccgcacctttgccattccccaatgctgacgccgcaaccgcctcctccaggcctcgcctcgcagttcctcaagtaatcgtccccgttcgacaaactgtagcatgcgtctttgctcatgaacgagcttctcatgtgagcttgtagtgtttgcaggcgagccttccggggtctaaacgagcaagccatctcatctcgcgcgtctctagaagtccatctcgtcgtcctcgtcgacgttgccctcggcaatgtcggtgacgagctcgcgctcgcgctcccgggcctcggcgcccgagttgaggtccttgcggtgagcgttcaacgggaagcgcatggcctgagaggataagagggggtcagcgtcgcacccagaagacgtcagacgtcaacaagggaacgagcgacgcaccttgacactctcgttgtgcagctggaggcagaaatcgatccgcttgccaaagaccttgcgcggctcggccgtctcgagcacgtcagccttgtcgctgccgacgagccagcccttggcatgatcgacgccgacgccgggcgggacgacgccgtcccggattgccttggcgacgatgtactctgcgtcctcctcgccctcaagctggagtttcgtgcagatgtcgcggagcgagatcttcgagtaggcctgggcaatctgggcgagacccgtcttgatgacgttgtgccggagcctaagaatgagcgtgagcgtgccgtcggcccggaacgtcggcccgtgcgtcgagagcgccgtctggaaggccgacaggtcaccgacgcggacagctgtgagcgcgagggacggagtgacggtcaggaggggcccgccacggatgacagacgagcgatgacgcaccctggacaatctggaagtaggggacgagcgccgacttgaggaccggcaggcggaacgttgaccgttccggaatgttgcccatcagcaggtcgacgacgatgaagaacttgtaggcggtctggatgaagcccggcgcaatgtgggcgctcggcgcacgccggatcgcctgctggaggttctcatgcgcctcgctgtagttgagctggacggcgcggatccggccgaggtagtagaggtagcgggcgagctgggcgttgccggccgactcggggaaggtcgacttggagacgagcttgtcggcctggtcgagcaggttgtggttgaagtagttgcgcagcaggaggttgatgagcgtcgactggaggtcctcgtcgtgccggagcgtcgccgtccggtgggcagcgagcagcagtctgtcggcggagggcagggtcagcctcccgtcatcgcgagcctcgatgaaggcgcaagacgcacggtcgcaggtcggcatcgcgactctggagctcaaagacgcggccgaggtaaaagtagaccttggcggcaaggtgatcgagcgatctccggttgagcttctggatgagctcgaccgtcgacgagaagaggtcggttgcctgggagagagagcgaggcaagcgtcaggacagcggccacacagcagccgatcgcaagcgacatacctttgtaaggtccttcgcatcgagcaggacgaggccagagagcaggcgcaggtagacgttctgctccggcacaatttcggtcacctcctttgctggcggcttggcctctgccggctcctcgttgtcgtctacagtggcagccgctgcgtccacgtccatcgagtcggccgacggcgacgatgtcgggacaaccgagagcagcgatgcaagggtggagtcgcctgcggccggggattgcgcgcaaggacagcgtgtcagggtcagccctgaagatcggcagagggcagtaagctgagctgtcgacgtacctttcgggtatgtctcctcgagcacctcgcgcaggaccttgaggccatcgtgctccttactgagcttcctccgcgtcgtcgtcagggtcctcagcacccgagcgctgaagcgcggctcaaacagctcgacgccgcgctggagaagcgccaggctcgccttgagctctgtgcatagagtgaggggtggcaaaatgctcagcgagaccaggggcaggcaaacgaccagctcgtcctcaccttgcttgagcgtcagcggcaccttcttgggctcgtcggcagccttcggcttgtcggtcaccttgtcgccgtcggcggccttcttggcgtcctttgtcttgtcgtcggcgggtgccatgctctcgtgcttctctactgctgcaagcgggtgtgtctgtgtctgagagaggggtcggatcggagcggtatgaggttgcgagatgctgggtcgtcgtcgtcggcggcctcgctggaggagtgcgcgcgcgcgcgcggcggcgagctgccttacgtctcctgtcacgccggcgtaaatcgggaccgtaagctgacgcggttctggcttgggcgcgcgcgcgacgggggatcctcccgtcgacgatgaccagcgacgcctccctccgaccgtcgttgaccagcgcgcagctctgtttcgccttggccctcgcccggctcacctcacacacggtccgcccaagcacgcaaaagacctagaagaggatagaggagtggatgtggggggcctgcggacaggcagccgtttggcaggcgacggctcggcgctcggagctccctgcgacagccggtcggtcggccgtcggtaaagcccggcacgatagcttcgactgatctccctcgcccgtagtccccttttggaacgatcaatctgcgacagacgtcgatcgttgccgctgtcgctgtcggagcgcaaggagcggcgccaacccggttcgtccggctcgtgtcggtgccggacgccgttcttctgcggcgacggtcgctcggcctttaagagctcgaggatggtgctcgaagaggttgtacacccatccataccgccccttgcctcgaagtcgagacccggcgcacgcccatccctctctcccttaccccgtcaaaccctctgccggtgcctccactcatcatggacgacaagaagaccgcctccggctcagccgagcacgtcgagaacaagaacgccccgatcgattttctacctcaggacgtcgagctcgcggctggcgtgcctgctgcggagggcttttcgtgcaaggccatgttccggaagcagtcgaacgaggccttcttccgcgaggcgcttgacaagtatggccacgacggtgcgttccctctttatctgtcgtcttccgcagtcggctgacgtttgagccatgttctcgcgcaggcgctatcaaccctgccgcagagaagcggctcgtccgcaagctcgaccggatcatcatccctcttctcgggtgcatccctctctttgtcgtctggctgtcttccggttgccagtctgctgaccctgctctcgtcatctctgcctcgcagaatttcatacgtgttctacgtgagtccctccagcgccctccggcaatggtaggaagcctgaccaagttggttgacgttcatgcagtacgtcgacaagacgacgctctcgtacgccgccatctttggcatcaaggaccctgcacccgtcggcctcggtctgcatggcaccgactactcgctgctctcgtcgtccttctgtgcgtccgtcgctgctcgatctttacggctgcgggctcgctgacgtcttttttaacagacttcggttgggcggcctgggcgatcccttcgaacctcctcctccagaagagccctccggccacgtacctcgcagcaaacgtctttctctggggggtctttttgatggcacaggctgcctcaaaacacttctccgagctgctggtccttcgaagtacgtgtggcgcgcctgggcctgctgcgcgccgttagtcactaacaacttcctgcagtcctttctggcgcctttgaggccatcgccgacccttgcttcatgctcacaacgtgcgtcatgtccctctcatactgtcactccttcgttgtcgctgacacgttggtcctgttcgattgaaacagctcgatgttgttcgtccgattgcgcgcgcagccacctgctggtagctctctctgacctccttccttcacttccagctacacccgggccgagcagcccaacaggatctcggcatggtatgctttcaacggcgtgggtgttgcgatgggtgggctgcttggctacgcgattggcaacatcaagggggcgctcgtcagctggaagtacgagtgcgtgccgactttcccccgcgccgcctttcgaccgacctcggaaactcacccaatcgaccctcccccagattcctcgtcatcggagctgcatgctcggcctgggctatctgccttctgatcttccttccaagctcgccggcgacgacgtggtggttgacgcgcgacgagcggctgatggctgtcgcccgcctgcgtggaaaccaggtacgtcgaccgctgcctgcgctgcctgactccccactcgcccgactgacaaccgcttccaacgctgcagaccggcattgagaatcgcacgttcaagatggagcagatgaaagaggcttttgccgacatcaagacttggctcttcttcttcatcggcgtcacgggtaatattccgtgagtcgcccggctcgtcttcacttttgcgcaagctggctgacaaggtgcctctgccaatatgctagtaatggtggcatctctaactttagtgcgccctcggctgtcatctctcggacgacagagctttaaactgacacgccaacgttctccaggcacactcatcatcaagggccttggcttcgataccctccacactgcgatcctcggcatccctcagggcgccctcgtcgtcttctggattggtcagctcaccctgggaccacttcttgactcttcgctatcgctgacccggccgcgcctctcgactcgacaggcagcggagcctacctcaactcgcgcctcccggccaactcgcggacgatcgtcagcgcgctgttcatgattccgacgattgccggcgcgcttggattcctcctggcgccgaccaacgcctacgtcggacggtgagtctgattgctgtatggcccagccctccctcttcctcgaggctgatctcctccgctgcttcacaggttgatctgcttctacttgaccggctcgtaccaagcgacctttgtccttagcctgagcctcatcaccagcaacactggcggccagaccaagaagatgatcacgacggccatgatctggctcggcgcttgcatcgggtgcgtgtcgttcgccctcttcccctcccggttagcctgctgacccgtacctattctctccttctcgcagcaacatcattaggtccgcaggccgctctctgctgtccctgcccaacgacaccagctaatctctgcctgttcataacagccccttcctttacaagacgaaccaagctccgaagtaccaggtgcgccgctctggttgccctctgtggtcgtttcactgacaccgactccattccaccactctgctgcagctcggtattggcagccttctagcggcgaacagtctgttcctttgcctttcgccttttgccttgcgtccgaccaagagctgaccgcctgcctgctactaccccttagtcctcgagctcatgatcatcctcaccctccgctgggtcctcatccgcgagaacaaggccaaacagcgcgtccgggccgagctggccgccgctgctgctgccgacgaggacgccgacgacctgaaggcaacgggcgggccgaaggcaaatgacacgacgttctcggacctcacgtgtgtcccgagtcactccaccctcagcagacgaaccttggctgaccagtatcggcttctgctctcgtcgacaatcagcgacaaacagaaccccttcttctcctacgtgtactgaaatgcctacgtgtactgaaatggacccctctacgtcgcgacccaggccctcgcccaggagagcctcttctcgtcagcatctcgtccagcgctcctttcccgcatcgtcctcgcactcggttctactctcgttctggaaagactgtgtctgcctcatcctctagcttgccagagtgtccgacagaaagccaatacccttaaggcagcccgtacattcacgaattggccggggcggccgactcagatcagggggagtgggagagagaggtcgcttaagcgatcgcatggatcgaacgaggctactcggggcgtctcaggccccggaagactgtcgcaggctctggcgaggtaagcagggctcaccaagtcgagcgctggtccaggccggggccgagagtcacacgcggcgccggccgctgacaagggaggttttgcggtccaggagcgggagagaagggcggctccgacctggcgatccgagccccgggcgactgggatgaacgagcgatggctgatggtagggtgcttgagggctgggcgcgctggcctagagcgtagtgtcggcgaggggcggctgcgcagcgcatcaggtgcgaatgagtgtcaagttgagtgagcggcgagaccagaggcgagcagggagcaggaacgtacctagggtacggggcgactggccatagcgcgaaagtgcggcgggcgtgcggccgtcgagtcgagaccggacggtgagcgcctgtcaagcgcaatgctgcctgtggggtgggctatggttgcttggagcatacggggtgatgttatcttcctgtcaaggtcgtcgctgccgtcagcaatcagcctgaagcaagatgcgtcgtcgtcgctcgaaaggcgacgcaccgggtctgtcagcacatgccgacgaccgtcgagaggtgttcatggcggggcggtcgtccgaccagcggcatccgcctcgtcgtagccgtatcctccgagagccctcaaccagtagacgacgagcagccagaagctggaaacgtagacggcgttggccacccggcgagtcgaccaccggcccttgggccgctgctgctgctgctgctgctggctgcggccgttgtcgagctcgagctcccggctgagcaacgggaaggggaacggaggaaacgtccctccgtcctggacgggatcgaagtcttctgccgagcggacggccgacgacttgcgctgcgggctgctggcggccttctgaaggagctggctggaagtgctggccgaggtcggcagcagggccggcgggagccagctcaagggcagcgtcgaccgcagggtcgaccatagaagggcggccgtcataccggggtgtgggagagcgtgaggtctcgttaccctacaggccttcgcagaggaggatgtaagggcggctgaagggtaggtcgtcgttggctgcgacgaaggcaggtgaaagggaggaggacgcgatgacgagagccggcaacgccgcgccgccgactgaccgtcggctccgccgatgcgtctctgccggcggcttcgacccatttgacactccaagcttaaagagcgtagtaagagttcgatatgatgagctggcttgtgagtagagttacaggagagagatgcgacgtgatgatgacagagagaacaggagggtccctggaatggaaggcagagtctgtagaattgaaaattaaaaagcgagtgggggatggatggtccggaggagcagatactttggagtgagagaaagatttggcagggtgggttcatgcaagaggactggtgaagggaggggggtcgacttgggtcgacgcgtctagtgtatggttgggtgcctgcgatcgagggaaggagcagtcagcccatcaaccagaccgcttcgtgaggattgagtaggacgtacggtcaagatgggtgccgtttggcagccgattaaatctcgtagtcgtcctcggcgtcataatcttcctccgactctggccgctggtacttgacgccggcctcgtcgagcagccggtagagctcgcccgagaactgcatgctcagcatttcgaggtaggacccgaccggctttccgccgatgacgagcgccggcaggcgggggacctcgatgatgcgctcgagcagccggtggagccggtacgtgtcggctgcagggcggcggtccgggagagtcagcttcgggagaataacggtgagcttggcggacgacgtacagcgaccctcgacgctgatgaagatgccgtcagtctcaatctcaaggtcactcagcatcgcccggatgctcaacgcggccctgtcggttgagcgcagcagaagaaggggcaggtcatcagtctttgcctcgaaactgcaggcaattgccatcggacgcacggatccgagtccttgccgacaatgacaaccttgccgccaccgagcgtgctcttgccgttccagaagtcgtcgaccgtctgctcgaccatgcgccggccagagcgcgacccgctcgcgggcgaataagggttgaagtcgaggatgagctctgcagagggcgagaagagggtcatcagttctctctctctctcgcgcagccgctcgagggatcgtgagagctgaagtcggagcgacgtaccggggtcgagcggctcatccgtgttgagatcggggagggcagccgcctctgagctcgtcacgtaatgaagcaagcagccgagctcctcccttgcatccttccagtgccacttggcgccccgccgagcaggcaccgccgtccgagatgcgccagcgccgccctttgacgagcgcgcagcgtcggccgggtgtatccggagcgagtcgtattctgccgcctcggggatcttgttgtacgtctgccggaaggggactgcgtgaggaacgtggcgggccactggtgtcttgggtagcggcggtgtcgaaggagggaggagttgatagctgcaggcagagggcgcgagcgtagtcgcgacgtcagcccgtgtctccactgtcggccacgacggcatgcgaagcagcggacgcacaggctgaaggtgagaaggagggcgacgaccaccgtcacaagccgggccatcggcgtccgagggcccttggaccgaacccagcgtcggagggcggccgtcctgccgccgtcggcgcgcgagccaaagcgctgcttgtagccgtcgtcctgcgggctcagcaggccgtcctgcggttcatcaaagaagggctggaagggtcagctggctgttcagtgggcaaagcgagccgatcatgatggccaaacaggcccagcccggcggaggagggcgacgcaccgatgcccgacgcttgccgttccggtcaggtacgagccagacggtcgtcccctgcgcggcccccttgacccagctcttgacgccgtcgcccttgccgccgccaccgttcgacgtgctgatgccgagaccgctgccgtcgacggcgagccgcgtctgccagagcgccgggccggaggcctgctgctgctgctgctgctgttgctgagcgagcgcgatgcccggcgtcagaggcggcgtcactgggaaggccgactggaacgtcggcgtgttgggcccatagagctgctcctgggaaggcgagaggtagaggctcgacggagggccggtcgtccgatgcgagagggtcgagggctcccaggtcgagctcgaggtcgacgacgacgacgcgtcgtccgggttggccgcgagtgagatcgactttgagttggatcgtgggcggagggaggcctacaaagagagagaacatgcaggggcgtcaggatagaacgcttgcttgcttgctcgctcgctcgcccgccccgaggccttcgtccgagggcaagaccccggccggaccggaagaacgaggcaccgagcaacggaggagtcgcaccttctttgcccggctgagcgcaccaccctcgggcccatggccgctctcgagacttggctggtaacggtgcccgatccgggctgaagagtcggcctgcatgcggaagggaggaagaggagggaaggccgagcgaaggttgcgtccagacgcgcgagtaaggggtgggtcgaagaagaggtgaggtggtgccggagtgttcgaggaggtgcgctcggtgcggcctttctgctgagaggcgaatctagggtaatgagagggagtagaggaaggagaaggagaggaaaagggtggccgttcaggaggaggaggagggacgttggtcaacaggttggcaagagcgagcaagacggcgagggtccctgcagggactctctccctttcagccaccagcatgcagcgagaggccaggctcgatgcccgtggggccgccagagcctaaagtcgcgcgacggtcggggcaaagcagacagacagcatggaaaatcagggacgaccttgggcgctgctcctgctgttgctcgaggccgcctatctgctggcttgctgcctagctgtttgcttgcttgcctgctcgctccagagagaaagcacgactctcagcgagctgtgcgcgggactggcctgcagcgggcgaggccgcatgcttgcagcgcaggctgtcggaggccgccgccccgacgcgcgcctcgcccgacctcatccaactccggcgctccggcgtcgccggcgccgcgcatgcgtccacagcgcctgtcgtccacgcagccgtcgaaataagacgcttcgaacagggctcatatgcgcgggtcggaacagcccatctgctctctcctgaagaggtgagcaaggcaaagtcgagggaggcctccttcactcgtcgcgcagcatgcctgtgaggcgcctggtctcggcgtcaggtcggatgcacttgacgggcctccgccgcgctccagtgagagaggccttgcacgagactgagatgccccttcgaagcgacagctgcagatgagtaagagagagggcttcacctggtttctctcggagagacgaccccggatcttctgcgacggcggcgcgggtcgctaccctatccgacgcgccaaggttgagaggagaggacgacgttgggccatgagatatctgtccgaccgggtcccctttgtgtttcgtttgacggcgccgtttaaggccaggcgcacgacttggcgatcatctcgacaatctgtgcgagccccgcctcgtcgtcggtgtcaaagcaggccggcttgatcgagtcgaggtcgaggacgccaatgacccggccgtcggtcagcttgagcgggaggacaatctcggactttgtctcgccgtcgcaggctgctctcgggtgcggccagaagggggccagtttgggtcagcaagagaccctgatgaaggcgagttcgactggtacaggtggaggacagggcaggcacgcaccaatgtggcccgggtaggcgtcgacgtcaggaacgatcagcgtcgtttcctttgcgaacgtgtcggcgcagacgcccttgccggctcgggtctggatctgctggcacgccggccggccgttgaacggaccgaggaggagcaggtcgggcgctgggccgggaccgagcgggaagaggtcggccttgaggtagaagcctgcgtgaagccacgggacgagcgcagaggggaagcgacaaagggaggccagcatcgattagcgggactcggagtcaaggggagtgccgcgccccgacgtaccacaccagttgacgacggcttcgcccgtctcggttgtcccgtaggcgtcggcgtacgacatgaagcagtggtagaggagcgaggacgtgttggagaggttggtgacccagttggcgtgcgagaagccgtcatcctggagcaagggagcgaggagctcgaggacgtgcgcgtagaacgcaggcttcctgtagggtatgacggttgggccgaggggtggtcagcggcaagtaggcaaggcaagggagcgacggtgctcgagagctcgggacggacgagctgatgtcggagaagcccagaatatcaccgtggtggggcatagtgcgagttgagaacgagaggagtcaagtgaaagggaagagggttcaggtgcgaaggtcgtcgttgagggggtccgggagccggagctgcgagcggggctgaccactttcgcgtcggagggagtcgaggagaagctcgtccgtctgccggcgttggcttgctcctttctccgacccttgcttcacgcctcccaaccctccctcgctcaggccagtagtgcacttcaacagcctctctctcaaagcaacctccagaccggatgggcaagccagcaaagcctcgcggaggcgcggccggtagcggacctgcaaagaggagcggtggtcgcggcggaagccgaggcggcggacgaggcggtagtcggacgggcggccggctgagggaactcgtcgctgatcggccagacagcctcgtccaggacgacgacgacgagggggagagcggcagcggctctggcggcgagagttcggagctcagtacgtgtccgattcacaccccgtctgctggccaaggccatgttgttcgacccgtgacgcgacgcatggaggctgacctcacccttgcccgtcgtctcctgctcaggctcgctctctggatcggacgaggacgaagaagaagacgaggactctgacgcgctgacaagcatcgacgtccctgtcggcatgtgggtgcgttggagaccgtcgctgtccctgccagcatcccgtcccgcgacctcgctcatcgccgactcgctctccgtgacccttctctcttccccccaggactttgaccactgtgacccgaaacgctggtgagcgttccccaccgtcgagggcgttgcgattgcttgctgatcatccttgtcgcttctaccatgcagctctggcaagaagctttcgcgcatgaacctgatcaaggcccttcgcgtgggctcgcgcttccgcggcatcgtcatgacgtctgtcccccttcttcacccgatgaagcgatgaaggccagccgggggctgcatcaagcgtgttactgacgagcatcctcgtggcttctgatctcaaaggccgaaaggcactaagcccgtctcgccgtctgacagggatattgtccttgcctcgggcctcgccgttgtagagtgctcgtgggcccgacttgaagaggtgccgtggagcaagatcaagagtccgaacgagcgtctgcgtgagttttctctcctcttttggccggcaagggtagatgcgacagatggaggacgctccggagagtgcgaccagggcaatcattcgtattttgatactgacctttcttgcccgtcctctcgtctgtatgcagtgccctacctgatcgcgaccaacccagttaactacggcaagccctggcggctggtcagtccctcacttggaccaggcgtccacctctcgccctttttgacctcgcatcttcgacggtcttcccgaatagaactgcgtcgaggccctcgcagcagctttctacataactggcttcaacaaggaggccgagctcttgtgcgtccacaactcttacattgagcggcgacgagtctaacactgacgcccgcccccaacctgctccggtccccaggatgtcgaagttctcgtggggccactcgttttggaagctcaacgaagggctcatcacgcgctaccggacatgccactcgtcggccgaggttcaggcgatgcaggacgaaatcatgggcgagattgacgccgagacggacgagcgccgcaaggtcaagggtacgtccgctctcgactggccgttcgctacctgcctacaccgttcctgagctgacatgtatgtgccctgcgcgttgtcgtcttcgtagagcgcaacgcagaggcctcgcacgggacgacagccctccagaacgactcgtccgacgacgacttcagcgggcttggcaacccgaatcaccggcaagtctcggacgacgacgacgacgacacgtaccactcctctgcagacgagggcaagcccgtccgggtcgacaagctcggcaacatcattcctgagagtgacgatgacgaggccgaggcggacgaggacgagcaggagcggctcgatcgcgaggaggtcgagcgcgagctcgtccgcgggctcgagggcgtccatgtcgaccgctgaggaaacgtgaaggaggatacgatcttgatgtcgatgcgcatccgatcttttgtgaactctggacagtcgggccagggcaaaggaggtggcgcgaaaaaccccgcgcgcgcgcaggcggggagggaggcctgcagcagattcgaggccgcgccccgtcgacctggccgcctcctcctccgacgcgccttcaccccttctccctctcccttttccgacagtttctccttgtgagttagccctactgtgtccaggagacgggccacacagcaggagcagtgcttgatgggcgctctgccttgatgagcggaagggggaggagaacccttgcccctcctccgcctcgggctgcggccctgctattgcccttcggctccccgtccctccggcttcctgccctcaggagtcgacattcgaccgtcgcctgcctcctggagccggagcgccgatcgctcgtcgccgtctcccagcccgtttgacttggacagaggctgacatgcgccctcttgctccgtgttgctcgctcccgcccttcagagtagagacgtccctccgacaacctctcgtccagctctcgcccttcccgtccagtcgccggcgcccgctttctttcctcttctcggtctccttttcggcgccctttcttctttccggcttcgagactccgaggcgtaccgcttcctcgtgagttccgtatcactcctgcgggcctcatctcgagacgaagctcgattgtggctggaggctgccgaccgacagtccctccgaccctcctctatccccctcggagaagatgtggggacggagcactctatcctcctgctggaggagccgccgaaggagccattgtctccgctgcgggcttggagcagcccgggcagaggtgacagcgctgccggggcttggtggggcagcggcggcgcgcgccgcggcaggttccaggcaagcctgggcgcgagagatggcaagctcgagcttgaggaggaagcgaccagctcgtctttccgtctctctcgcccgaagctggaccgatcgtcgttgtcgctgtcgtggagggcgcgagagatgcagccttctcatggtacactagagctgaccctgtttgcgcccttcctcacccctcttcccgctgaacaaaaggtcggacccctccttcccctcctcctccccctccgtctccagctcccaacatggccgacaacgtcgaggtcgacattgactcgattattgaccgcctcatcgagggtccgtccgccctcttattccctccctcgccgtgtctgccgcagcgccggcaggcagggcagtcggctgtcgctcgcgaacgaacggctgaccgagtaccgacccgcctgcgctgctctacctcgcccgtctcgtcgaccgagcagtccgcggccaccggccaggaaagatggttcagctgcaggagcacgagatccgctacctctgcacgaccgcgcgcgagatcttcctccagcagccgatcctgctcgagctgtgcgtccaatctccatcatgctgaggcatcgcgtcggccgatgaggttcgtgccgccaggagcgacgaagacctgacgtctcttgtctcttctgctctgtctgcgcatcgcagcgaggcgcccatcaagatctgcggcgatatccacggccagtactacgacctgctgcgcctgtttgagtacggcggcttcgtgcgtctccttcctatgtcacgatccagcgccgagccagcaagactgcgggagctgaccaggcgagcgaccgctcattctcctgcagccgccggaatcgaactacctcttcctcggcgattatgtcgaccggggcaagcagtcgctcgagacgatctgcctcctgctcgcgtacaagatcaagtaccctgaaaacttcttcatcctccgcggcaaccacgagtgcgcctcgatcaaccggatctacggcttctacgacgagtgcaagcggcggtacaacatcaagctctggaagacgtttaccgactgcttcaactgcctgccggtctcggccatcgtcgacgagaagattctctgcatgcacggcggcctctcgcccgacctccagtcgatggaccaaattcggcgggtgatgcgcccgaccgacgttcccgagacgggcctcctctgcgacctcctctggtccgatcccgacaaggacatctcgggctggagcgagaacgaccggggcgtctcgtttacgtttggacccgacgtcgtcacgcgctttctccagcggcacgacatggacctcatctggtgcgtttccgcctcgttcgaaagcttcgggcccatgagactcgccgcgctgacgcctcgtttttccctcacgctcactcggccctctcagccgcgcgcaccaggttgtcgaggacggcttcgagttctttgccaagcggcaactcgtcaccctgttctcggcccccaactattgcggcgaggtgcgtcgccctcctcggttgcaaaggcgtctcgtcaagtgccgtcgttgactgtcccctccttccctcagttcgacaacgcgggcgcgatgatcagcgtcgatgagaacctcatctgctcgttccaggttctcaagccggccgaaaagaagcagaagttcggtgcgggtggtgcgtccttcccccttcaaccggcgctctctcctcgtcgattgctgacctgcccggcttcacgtcctcctcacagcttctcgcggcaagaagctgggcaagtaggcgcgacctcgctgtgtaggactgcttgatgcgatgacgactctttttctcttcgacgaaacgtgactttgtcaggctatggaagagtggcttgctctgtacctgtccgtccctgtccacggctctttgtcgcacttgtcccttgctagcgtcgggccaagtgcttcgtcatggcgcgtctccaatctgcccctcgaggcggcgcgccgagccggtaagacgggcgccgtcggccgtcgcctcgaccttgacctcgacccgtcactcccttcccccatccgagcgcaaccccaacaaggtcgcctcatcagccaacgtactcccagagcccacatctccgtgtgctagctctcgccgtcgtcgctgcacaacaagggggtcgactcattcgcccgccagcccgtccactaagctccagccgtccagcccaacgtcaagcatcgctctcgcttcgttgccgtcctacagcttgactcgtaccctcttctctgagagctcttttgtgcgtaatcgtcacgttccgtttagctgcctgtccctcaggccgctgacttatcccgtctcgcaatcctggctaaacagctcagctaaggctcctccagacgcccgcctgccgctagcctcgcccagcaatagcttcggcctttctgaaatctcgacggtcgacgcttctgaacgacgctctcatctgtcagtctacttgtcggagcgcggctggaatccaagctgggttgcatggaggaaagaggcgggtcggccggtttgtcggttgtaggctcgggcccggccggtccatagcagcgcttcccatcagccgagcgggctcgttgcggttagagcttcaggactcctggattctcgttgcccgtcatgcatgggcggcagctacttacaaagcttctccaagggctgggttcgcggcttaaagaggggtcgagcgttgagcagaagagcgacctgaacggcagggcacggccaagctgacgtcccccgttcttcctacccttgtttgcagatactctctccaccttctcctctatcctccttccgcaatgtctgaagcatctggcgagattgacctcgactcggtcatcgaccggctgctggagggtgcgtctcgttcctgctggctcgaccttgcgtccattccggcttggacacgcggcaagcaacaggactagcgccgctgacgctcgatccctaacatcctgccctctttacttcttgacacgcgcgatcccgcaatcgaccgatacccaatctcagtccgcggcaaccggccgggcaagccggtccagctgcaagagtacgagatcaagttcctgtgcacccgcgcgcgcgagatcttcctgcaacagccgatcctgctcgagctgtacgtctgctctaccgtctccacttctgcttcatgtgggcaccggaccgtccggtgggcggtagagcccgcgggcggcctgatgcagccaagcgacacgctcgtccctgctgacagtctccacttactgcgcctacgctgtccacgtccttctcatgctcccattagcgaggctccgatcaagatttgcggcgacattcacggtcaatactacgacctgctgcgattgttcgagtacggcggcttcgtgcgtcctcctcactcccgcaggcttccttgatgccgctcccgctgacccttctggacccgctccgcgctacagccgcccgaggccaactacctcttcctcggcgattatgtcgaccggggcaagcagtcgctcgagacaatctgcctcctgctcgcgtataagatcaagtaccctgaaaacttcttcatcctccgcggcaaccacgagtcggcgtcgatcaaccggatctacggcttctacgacgagtgtccgtccctcgttccttcctattcgagcgccagtcgactgtgccggaccgaagtggctgaccctatcctgcactccgtccacgtgccactttgccctttcgtcgtcatatgttcgcgcttaaggcaagcgtcgctacaacatcaagttgtggaagacgttcaccgactgcttcaactgcgttcgtccctccctctccaatccgcgcatcatcggccatgggaggtcagtgcaactgactactcctccctacccatcgtgcgccatctgtagctcccaatcgctgccatcatcgatgagaagatcttctgcagtgcgtcgacccttcggagcttcgtttctcggccacatactcgtgctgctgctgacgtcagtcacaccttcacttgcagtgcacggtggcctgtcgcccgacctccagagcatggaccagatccggcgagtcatgcgcccgacagacgtccccgataccggtccgtcgcttcgctctcgcgccgcattgctgacctcgcagagatgttatgaccgacgactgacttgacgccctctctatcgcaggccttctctgcgacctgctttggtccgacccggacaaagatatcaccggctggagcgagaacgaccggggcgtctcttttacgttcggtcccgacgtcgttgcccgattcctccagcggcatgacatggatctcatctggtgcgtttccgcctcggcaactcgcgcgcccgatcgagtcgctgatcttttctgccgatccgtctcgccatcttccctaccagccgagcgcatcaggttgtcgaggatggctacgagttctttgccaagcggttgctcgtcacgcttttctctgcaccgaactactgcggcgaggtgagtcggcctgcctcgatccgcttcacgaccgaagtgctgatgtcagggtcgtccacttcgttcaactcgacgcggtagtttgacaatgcgggcgcgatgatgagcgtcgacgacacgctcctttgctcgttccagatcctcaaaccggccgagaagaagccgaagtacggctacggcgccggttggtctcgcgcccttgaatgcgcgcacgaggtgcgcttcctcgcttttagcggatgctaatcgtttcactccacacacctccctctttagctgtcacgccgccacgttccaagaaggccatcaccgccggcaagaagtgaggcgagggagcttctcctgctctagggcctcccttggggccaaaagatgcgcgtgcctccctcaaaggggggagcggcatgcaggacgggcgcgtctgtacggggtggagggacggagacggggttgccaggtcggcgccgagttgtctatcttcacagggacgacagcgtaacggggagaggtagccggtggctggtcccgccttctctcatctctctccggcagaccgcccctttttcgacatgaccttttcagcaagagcctcgacagggacaacaggacatgacatgacgacaggagacggaggcaaaggtcggggcgtggcgtggcagaggtagcggacaggatcggagacaagaggagacgaagtccgcgcgcaataagtgggatgggtcgtgcagaggagacggtcggatcgttcatgagaggagggcagcggatcggcagcgacccctcagggcatgctctcgcgccgagcatcggcataaggggcggccgacttccttgcagccgccgatgccttgcgaggtgcagccttccgcagcgaggccgttcggctcagcttgaccttgcccgtcgccgtcagcggctcctcctcgcccgtgtcgctcgtcgccgtcgcgatcaggtcgggtgtcaggctgcccgagacggccatgagcggcccggcagcgacggcggcggcggcgatggtcgagacggttggctgcaggtagcctgccgggacggctgtcccgagctggcggtgcatcttgcgctgctggttttcaaagtagacgcggagcgggttctgcttcgacatgcctggcggtgcgggcagcagtaggccgagggttcgtcagcagaccggtcgccccgagtgcgctcgcgcacaaacaccgcacctcgcttgttgagcggcgagaagatgcagtcgatgccccgcttgacgcagagctcgcacggctcttcggcctggccgttccctctggccggcgccattgcggtgcactttaaacagaaggaagcgtcgtcagcagcaacacgtcgcacatcgatcctcccgagcgcgacggaccttgtgcttgtacttgcggcaacactcacacgagtgcacgcgcttgtccttcttgatcgccttgccctttggtatccgagcgagcatgtggctggcgttctccttccagtttgtcgccgttgctggccggccggagggtggcaggcgggccggtagaatgaaagcgggcaaaggtgaagcgacggcagccgccgtcgcgaatgcagagaactgggccggcgaggcgtagtgcgaataggcgagcgatgggtgcaacgggtaagtgtagtaggtgccgccgaggctgctggtgctgccgcccgcaggagaggacgagtagtcgacctcgctctcgccctcgtcggccgagacgagatcgttgctcgtcgactcggacgaggccgacgggtagcgctcccggccgtcgccatcaatcgacgacgaagacgctggccgccagtcggcgtcaacccggatgccgagtccgtacgcagagtcagccgtcggcagggccgcttcgacgtacgacggaggcagaggcgccggcgaggcggacaacatctgcgagccgtagaaggcagcaccgttgtcgggcggagtccactcttgaaggccatgccgaccgatcgcgtagctagcgtatgggtccggggtcggcgcgagcgtaaagcggccaattgaagggtcgtaaaaatcgaggctcgcgcggtcgtcgcaagtttcaagcgccgcgtgcccgtcgtcgcgaggcgaaggacaggactctgaggtaccaggtcccgcatagggcaaggcgatatggttctgccccagccggagaatgcggtcgaacgcggccgggacaggcggcagctggaggccaaacgtcggggccgggaaggtgtagccgttgaagctcgtcggcgcggttgcgggcgggtatgctgggccgaattgggttgtcgaccggaggaacgactggagaggcgggacggaccatgccgtatgagtttcgaaggccggctgctgctgatcgtgggcgtgctgctgatcgttggcgtcggcaaccgtcgggagcgggaagtcggccacgtttggcgtcggaaggtacgagccgccgccgccggccgaggaggaggacgacgacgagattgaggccgtctggttcggcagtgaagaaccaccgtacggctcgagactgtgcgcgagcggatcatcgtcgtccttggccaggtcggcgatgtgcgaggaagctccccagtagccggcgtcgctgtcatgtagaccgagcgcgttgccggcctcgatccgcgaccaaggaaggaagccaggcgagtcattgttgtcgtcgttggcggcaggtgagtaggccaactcgctgtgcggcgcggggggttgatgcgacatgctgagagggagaggaagaagagggcgggcgcggttaatgggtggaccgacgtgcaggcgaggatcactagctcacaggataaggcgagtgagcgtctgcaaggcgccctcgagagcgaaggtggacgtcgagcacaaaggccggcaacagttagcaacagaggggttgttgaccggcgactctgggctggcgtcgcgggcaagaggcgttggtagttgcacgcgcgctgagggtgcgagagggagaggctgatgagggaggcgtgctctggcgcgtgcttgcttgaggaggtgacggtggatgcgggaggctaggccagctagcgggtcaacgacgtgggccagagcagcgccggaagcttgcgagcaagcgtgggcgcgcctgggaagccggggtgctgatcggagggaagggggtcgactggcacaagccgaggcgagcgagccacctgcggggcgatggcgagccttctggaagagggttacagcgaggcgaggcgggacccggtcgtgtgggtttggcgggacgaggaggcttgcaggagcgaggagcgcgggcgggcgggagcgagctggtggcgcgtgccggccggcgagctggagtcagttgatgttggcacgtaggccatgctgatgggcaagcagatcgactgacctggtaaaggacggttgaggtaagaaggggtggcagatggcggtcaggaaggagagaagggagcgagggcggggcggttcgcttgctgcgcgggccgagagagtgagcgagagatcgccgtcaagcccgcagccaaacagggtcgcatgctctcgcacggcagaggatcaagcagggcggaagcatacaagagaggccgctctaacatcaagagggttgacgagcgaggacatacaagggcgcgggcgtcgctgcgaggatgggagaacgcgcggatggccaacaaggcgagagtgggctgaagagagggccgggagtgaaggcgaggctggaggagaagacccaaagaggaggcccgacaagaacgtagcgctcagtagacgtggccgccaccgtcggacgagccagcctcgctgccaaagcgcgcgagactctcgtcgtcggcggtgacatagtgcgagtcctgcgtctgtgtatcgtacccgcgcgtcgtcgtcgtcgtggctctcgagccggcccggtcgtcatagtcaaacgccccgtcgtcgccgtcgtcatcgtcgaacggcgtcgagagcgcgtcgacatagacggccgaacggccgtccgacgtcgtcgcgtacgacgctgcgtgctcggtcgggagcggcggccgggggaatcggtgaaggacgcccgagcgtgtcgcgctgtcgggcgagtcgagcgagggcgccgctcccgcgccggaggctggcacgatcgctcgaggcggactggcgccaacgagctcggggatgagtgaccgccggtggggcgagtgaaagtagtcgcgccggtcgaccgagtctgggctgcgaagagcggggactggaggagcaaaagatcggtcagcgaggtgtcgcggcgccctttcgtgtgagcgtcgaagcaccttgctgctggctgacgcgcgtgatcgtctcgttggcgccacagtcgtcttcgctcggcagggagccacttgagggaggcgtgtcgccggacgaagcgcccaagctggcgtagctgatgtggaccggccgagcgagcgacgcgttggcgacgtcgcgcggggccgattcgggccggtaaaagaggttcttctcggaaggcagcgggaaggaaggatgccaccggtcagcgagatcacgagaagccacaggaatgcgcgaggcgagtggacgtacctcgtagtcgtcaccgtaaacaaagagcggaacgggcgttgcgtcgttactgccccggccagcgccggacgaagccgaggtcgcgcgcgactcggtcgacaggtgccggtcgcgctgctgcctcgggaacgcccaggcctgctggaggcccctcgcgctccggggcgagcttgagctcgacttggtcagcggccggacgaccgggatggccgtgtagttgtcggtcggctcggacgtcgaggccgtgccagaggctgagagggactgggcgcgcgacgagcttggtccgacgaggttgctgatcgagtcgaccggtgcgggctcaccgggggcacgttggcggtctgagggcgctttcgacatgcgccttcccgccctcagagcgttcgacagcgcatcgtcgtcgtcgtcgtcgtcgtcgtcatcattgtggccggcctcaaccgccttgctgccggcctggaggtacgaggccgagtcaagcgagtggcctgcgctgtggttctgccaggctgcgcgcgggcggacgaggtcgttcgacgccggccgaggggccggcccggccgatgacgaggatgcggtcgaggggaagcgccggtgaaaagcctggatcgacgtgacggagcccgagcgcgacgaggcgtgccggtgccggtcgcggccggccatggacgcagcggacgtcgccgtcgtcgtcaggtcgaaggtggcagcgacgggcgagagcgcgatcccaacatcgtccgcggccgaggcatcgaggacctctgcgagctcgctttggcggtcttccgacctgcgtgccgaaccccagggcatcggcccatagtcctcgctgtcgccgtcgacgggccggctgatgtcgatcactggcccgtcggcgtcaaagacgctccgctcgctcgacgacgaggccgcctcgggcggcaggaggcggagacccgctggcggcgtcctgcccgcgaatgtcgactggcgctgctgctgctgctgctgctggccggcgtgaaggctctcgacgatccggacgtgcggcagctggggcgccggctcgggccgcgacttttcagagaggttgccgagcgacgacgtccgtcggatcaggcgcatcgccgagcggagcggcgagcgcggctcgccgagctccgccgcgcgcccacgctcatcaaacgatcccttgcgcagccggggctcgcccggccggaggaaggcaaacgacgacggcatgtctggcgactctagcgcgcgagcaatcggccggccgtttggaccctccgcgtcgaacgagaagcggccttcagcgctccctcggaggtgcgtcaggctctttgaccgtcgccgctggcgcttgacgtcaaacgaccgggtcacggcagcctgcttcgtcgctgctcgcgcccatgccgctcgctcatgctcgcgcgtctcgccctcgcgccgaacaagctcctcaaacgtcagccgccgggccgcctcgtcgccggcagcctcgctcgtccgcgaagaaatcggctcgagatccgggtcggagtggtcaacgacggcgtcagacgcaaccgaggggcttgttgacgaccgcggcgtcggcggcggcgtgatgaggaacggcttgagcttgggctgcggaaagacgaccgtgtcgcagaaggtcgaggcctcgtacattgtcgaccggcggttgctacccgagccgcgagggacgctggaagacactgcggttgctcgcctcgtggcatttcgcgcgacgccgtccgaggccgggccagtgtccctgtggtcggcgcggaggtaaggcgggatccctcggctgctcggcccccgtagctgcttctcgggcgacggcgccgggacaggccgcgtcgggacaaacgtctcggcctcgaccggctccccaggcgtcaagaacggctctgaaatcttgcgcgacggcccccctcgacgtcccctctggctgacaccgcttcgcgagcgggcaagcggcgggacgggctggctccatgggaggaggtcggccgacggcctgctggcgccgccgacgttcgaggtcgagttggaccgctggcggccgagcgcccgcgagctgccagacgacgtccgtccggtggcggtcggctcgtagtcggacgttgatgaggcaaacgagtcggtcgtcggcgtcgagcctgggctgaggcccggcgtcgaccggacagcatgcagcactgcgccagctccgctacggctcgccggcggcggggacgagatgaagggaaagagctcgcgggccgtccggctgaagctcgcccggcctgcagagtcggagtacgacgagcccgaaccgtcgcgccgccgtgggaagccgccggcgctgctggacgtgctgctgccggcgacgcggacgcgcgggctctcgccgatgccaccgccgcttccgccgctgaggggcgaggttggcgagaaggcccggaggcgccggtcgtcgggcttgccgtggacgtgctgctgctgctgctgctgctgctgctgctgctgctgctgctggccgtcatcgtagacgaccgccttgcgcgacgacgcgtgggcctcgtccggaagcaggcgaagcggtcggtacgtcgacggaggggcgatcgggcctttgtacctgtgagtgcccagagcgtcagcaacgaacgaaggtccgcttcaagcacgtcaggcctgagagcggccgagttctgaggagaggcgcagaaagaagggcggtgcgacgcacgggacgaatgtaccagcgcctcggtcgtcgtcggcgtcgtcggcggcctcgcctccccgcggcctctgacggtcaagcgcgacgacgccgaccatgactgcttgtgagagcggcctggcgagggagcgtctagagagaagagagggccggtgaggtagaggtctcgtcaagcggcggtcgaggtcaagggcgagagggaggggagggaagcaatccgaggggcgcgcgacggcggtggctgagcagcagtcggcctccgacagcagcagcgagctgcaacggcgagccggacgaagaagagacggagagcgggcggagagcgggtagggcgagccagtgacggactggtcagagcgagcgcctcagcagggacaggaccgctgcggtcttataaaagggggtaggattgatggcagcagcagcatcagcagctggcggtgacgtcgtcgctgcgacacctctcgcatgccatgtcgtcccgtcgcctgtcggacggtcgctcacgtgcggctcggtcgagggaagggcagggtgcggggcgtcatcaattctacaagtgtgtcgttcaaggtcgtcaaatggtgtgtatgtgtgtgtgtgtgtgcgatgtgctcgtgggggtttctgcgtgagtggggggggggccggaaaggctatattgctgatgccgctcgtcgtcgccgtcgtcgttggccgtccgaactcgatcgtcagcggtgcatagcagcggccgggtcgtcgacggccttggcgtcttgcaaggcatgattgtcgacgagctgcgaggaagatgcaacgcggtcagcaagaagccaatggcagggagagaagggagaaagaagagggggtgggagaaaggtctgctggcggagtgacgtcctcctcgtaggcgaagtagacgaggacgccggtgactggagggaggggcaggctgtcagcaaggcggcgtgaggagagacaggaaggagagcggctcacgagcgcagcagagggtaggaagcccggagccggacgccaggccggtgcaccgcttgcttgagatggacggggagaaggaaaaggcatgggcggatcgtcaagggatggagatcccgggcaggaagagagactcttgatgaagtcgccgcgaggctcgtcttgggctgcagccctgccatcaccaggccgtgtcaaacggctgggcttccaatgacgaggcggtactggcagcggcggccgacgtcgatggtatgctcgcgaggaactcggcggcagcagcggctttgacaatggcccgctggcgggcagtcgtggcggccggcttcgtcggagcgctgcaaaagggcggacgatgaaggacgcgatcagcaatggcgcgtgcttgcctgacaacgacgggcgacgcacgcattcttccgccgcgtctccagcgccttgtcccgccgcttgtcgagctttcggacgtgtgcagcatggccggcgacgccgccgtgcgagcgcagcgagagggcttggagcgtcgacagactgaaggaagcaggacgacggcatcgaggtcagacgctatctcaacacgcgtggcaaatcgaccgagagaagaaccgaccggtagacctcgatttcgctgccgtagccatagtcgacggaaggcacggacaggagctctcggtctaacggcaaaggatctggtcggtcagcgacgaccgtcggccagaaacgaggcggtcatggactgaccgttgacacgcaaaagctttttcgcgtctgcaagctccgcgtgtaaggcagccggcgcagggtagatgagaatgatctgtcagaaagggactcggatgatcgaaacgcaactttcgttggagatacgcacggcttttgcgcaggacgggcttgtcgacgatttcagcgacgagagctctgagagacaggggtattgtcagccggtacgtcagaagcttgcttcctgcaacggagccaccgacctccaggccgacggccaccggtcgaatagcggctctccttcttcagccggttcggtctcgtggcgcgctttggcgcgggcaagtctgtcagaggaaggcagccagcgcaggagtcagcgaagctcaaggtgaagcgacggcctgcagctcgagcgaacgagttgatgacttggagactgcggcgagacaggccagaagtcagcccggataatgagccttgatgagaaagggaagaacgaactttaagccgttctcggcggttgcctcgatgtagatcggctgctcaaatgtgcccgcgccgacttcagcgactcccttctcgtagtttgctgtccgcggcaaagtccggtcggcgatgacggccgcctcggtcgctgcccaaagcgcatcgcgctcagcccggccggtctcccactcgctttgcgataggccccagcgtgcagcgccgggtgcgccgttcagagttgaggtgaacatgcgacgcgcgggtgcccagccgcgcagatgaggcccagccggccatttatgtgttcgggtcccaatgatgatgcggtatgatcgatggaggtagtactggaggtcgagttggtctggcgcctgatatctggccggctgatcgggccctgacggcaccagtttgtagctgggtgaatcatcgacgcggatgtcctccggctgagcggccaggaggtcagggaacgaggcgcggaagaggatctaccgcagcagaccagccaacacagcagagtcagcacaagcagtggccgtcgtcgcacaagcctttttctcggccacgtacctcccagacgaggtcggtgtagcacgaccggaagaagcgcgacgtcgccgacagcgcaagatggtcgcgcagctgcaaagccgtccaaccccaattcaccatcgtcatcggcagcagtagaaggagcagcctgtcgcaggacgtacgtcgagttcggcgtcaacgctgatgatgtggtcgaggatctcgatcgggaataggctgaacgagacggtgctcggcgtcgcgagctcgcgccagctgacgacctgcgcgagggcggcgcagagcgagtggcgagcagaaaagtttagcatagagtcgagcaggagcgtcagcgtcaagcgtctgtcgaagacaggtgggaaagacaaggggtgcaccttcttcttgaccgtcggcttaacccgcttggtcttcttgcccgccggccgctcgtcctcgctcgagtcgaagtcgtcgccgccatcgccgccgtcgctctcgtccgcctgcagtggtgtttcgtcgtcgctcgaggccgcgcgcttggccttggccttactcttgccggctgccgagcgggaggagtatgcgcggaagagagactgcgtcagcggtggctcgcgggcgacaggaggtcgagagctaagggccgtgcggcgcacctcgcgaagcccgggccttctcaactttgccagacgcctcgccgaccgtcttctcctcgtctgaggtcgtacgtgtaggccaaggcaaattccgaccggtttctcatcagctcgagtgcgggaatggcgacaagctagacggaccttcgtcgtcctcgtcgacggccttgcgcttgcccgccgcccgagtgttcggccggcgactgcttgacgcaccggttgagcggctggcctgcgaggctgcgccagtcgtacccgaacctgcagcagaaggaggcagcatcggcatcacgtcagccgttcggctcttgctgctgcctgccgagacgaggtcctccgggaaagaggagacgcgaggccgacgaaccgctcgaggtctgcctctgcccgctcgccgccggctgatcctcgcctcccgccgtcgctgctgccgtcgccgtcgtcgagatccgtgccgagcgtcgcatgtcgtcttcgagatggtcgagttcgtcgacgaggtcgttgtcgtcgacgggcgctccctcgcctgccctccctttgatggtgatggcggaaggcggcggcggcggccgcctctgctgcgcgtcgatcgcggctttggcggggccgcgcgtgcgcgcgcctctgctgtccttttgttcgcctgttcgagccgggtgccctgctgtcgggccagcaggagtgcgagagctgtcgcaggacagggcccggcaggacgagaagggaggaggatctctttctgtggctgaccctcctctgaatcaaggggatcaaagaagagagaacaaggaagaagcgctcttcctccatctatgctgccgcctcctcctcctctgttggcagctccggtcgacctgtccttcgacaacacggcagccaacatgctcgacctctccttcatccgtcgaccgagcttgaccttgctctctcgcggcttcaccgacgcagaccttcttctgggctcgtgggacgaccagctcgacgtcgacgacgccatccaccgcgccatggctacccccgacgggcgaacaaaggacggccgggtggcgggcgacagcagctcgagcggcggcccacagcgtggaatggcgacgaccggcttggagctcgaccttggcggcatgctgctcgagatggctggcagtctcgacgaggcgagcgacagcaacccctttggccggagccaagcaccaccagctgtcactcgaccactccatcctttccctcgacgccggacgccgtcgccgcctcgtcttctcgcccgcaagacctcgctctcgtctgcgccgaccagcccgaggatgggtggcatccgctggggatccatgtcgtcggccgccgccgtgctcagcccgtcgtcgtcgacctcggagacgacgctcggccctgccttcagcctgcactccggccggtcgaccccgatcagcggcgtgccttcaccggctactcgatttcccaccgccgccgccaccgacgacggcaatgaaggtcgccgtcgtagccaagagtcgctcgccgaggaggacgccctcgaggcggggactgcaaggtcgacctcgaccaccaccagcatcagcagcgaaggcagcaccggcgcaaccgactcggacgctctccctccgacgccctcatcaccgacagcctcgtctcactcgtcctcgcacgacggcgaagccctcgctttcgccttccctctccctcccgtcgcctttgggctttccctcgacggctgccttgcagaccttccctcgacgccacaagcgtctcagaaagcggccctaccttcggcacctcgcatcgtcgctccagccgagtcgacccggatcccgacgattcccatcggccgtaagcactcggtcaaccgaagctcgccactgtcgcccgctggcgctgccgctcgttcgaccgccgccttagctagcctcgcttcctcctccgcctcggcaccgacctcaccgcgtccggaccgtcctctcgcacccaacatgcgtcgcacgacctcgtcaagcaaccaccaccagcagtaccatgtcggcaatggcggaccgctgccaccgccctctggcttgccgccggcgcctccgctaccgacgcagcccctgacgctcccggcccggacctaccaccaaaagacggcgcactcgacctcgtcgacctcctcgggccctctctcacccttagccgactttggccttgtcggcgcctcgcccgtcacgagcccgacctcgtccgtcgcgacatctagcggctcgcgcggcctgcgctcgccaaagagcagcaagtcggccggcaacggcaccggcggcggcggttggtcgcagctcctgtcggccttcccccggagctcgtccaagacttcgctcggtccgtccggccagggcagcatccgctcggctcgctccgactcgtctgaccgagcaggcggcggccttctctcgccttttggctcgcatcgccagtcgcacccttcgccctcgttctctgcaccgtcctcgcagccaatgggtctctcgttctcggccgacgcctcgctcgcatcggctcacccttacgccaagcgatcgccggcgacaccttcgggccggctctcggacccaccgacgtcggccgactcgttcggcacccagcgccgagggtcaaacgcccagcagcatcgggcggagcggaacggcggcggtggtacgccgcagcttgcgctcgtcgtcgccgaggcggacggcgacaacaatggctataagtgccccgtctgcgtcgagcggatcggggccgagtaccggatcaagggcgagaagccagacgtcattcctgaatgcggccatgcgatccaccatgtacgtcttcgcggctgcttcgactaggagacgcgaaccccggctgacctttccttggtcgctcgcaggactgctttgtgcacgtctacggccctctgcccgagcgcaaccgctttggcgacatgcgcaagccccagtcgtttggcgtctgcggcgtctgccgcaagtcgatgaaagtcggcgagtcgggtgcggccggcaacgtcagcagcggcaaggcgtcgagtgggttccgccttctgtttctccgccctcgcaactacgcagctgactctcttggatcttccctctgcagagctcgccgcgctgacaggcatgcagagcatgagcgctcctccgccgccgctgcttttgccctcgggcggagccgggagcggaagcgcctccttccttcaggactctgacggcgatgacaacgacccgatcgacccgctcgcttcgggctcgtcgtcgacccgatccggccaatcggaccacgtcgtccggtacgaggctgcctctagcacacggatcgtcgtcccgagcatcaccgtcctgcccgaataccgcaacgtcgtccgcggccggccggggaccaagacgaccgtcaccgccgtcgtcgtctttgaggtccccgagcgagcgccgagggacgcaccggagccgccgtcgcacgacggacgctcgctccgaggcacgcggtccgaaatgtcgctccggccgaatccgaccggcctgcctggcgtcccgaggggcggcgagtttggcgaccctcaagccgacgtctcggccacctcgcacacgccggtcgacatcctcctcatcctctcgctcgcctcgccctcgacagccacgtcgtcgacggccttcaagacgcgcgtcatccgctcctcgctcgccttcatcatgtccaagatggcggcccgcgaccggctttcgatcgtcacctacgagagcggccaggacggcgtcatccgcaagacgcccttccttgcggtaggtcgtgacggtgacggccggcgcaagctgctcgacctcatcgccaacatgggtggcgacgacgaccgctacatcgtccccctccaccgcgaggagcgctccgacgtcgtctcggccgtcaacgtcggtgagtcgcacctttctcgactgttccgtctcgctcccttcatcagcgctgacgctctctaccctccgcagcgctcgacgtcctcctccagcgcaagacgcgcaacccaatctctggtgtcgcactcgtctgcgactcggccgacgccgtcaaccgctcacagatggatctcgtcatcgcccgggccgaagcggccgccgtgcccattcactcgatcggctttggtaaggcgcacgacccgtcgccactctggcttatctcaaaccacaccgcgggcgactacacttttgtgccagaatggtgcgatttgcaattgcctctcgcgggctaccgacacacgactgatgctctccttctcctcgcaggaacgacctccaggagtcgctcgccggcgtcatcggcggcatcatgagcatcgccatgacccaggtcaagcttcacctctcaacccaggacccctcctttcgctttgccaaggtctgcggcccgcttaatgccatcgtcccgcctgacggcaagaccatcgacattgagctccgcgagctgtgccatggcgagcggaaggagatcctcgtcgagatggagctcctctcgcctggtcttggcggcggccaggagacaaagggcggcggcgacggcagcgatgacgaggacgacgagaccgactcgcgggcgggcgacttcgcctccgagagcggtgccggcggtcggctcggcagcgtcggcatggccaagtcggccagcagtcggtcgtccaccggccgctcaccggcccgcttccgcgaatccggcagcgggtcggacgccaaccatctcggtgacgccatgttcggcgccaatgcgacgatcgacgaggtgccctgcctggagctcgactgctcgttctttgacccgctctgctcaaaggcctgcacgcgactcgcccggccgctgctcctccaactcacgctcctcccgcaccactcggcctctccgaccggcggtagcgcatccggcccgcccgagacggtcgtcgtccggcgccggatggagctccttgcatccgacatgatctcgcgcgcgctcatcttcatctccaaaacgcggcgcttcgaagcttcgcttaacctgctcgaggagacacggcatgtcctccagggcaagattggcgatcttgtcgagctcatagggcgtgagtcggctagcggctttggcaagagtgcgaagcgcgctgtcagagacgcggtcaaccgggccaacctcgcggcgctcgaggccatcatgctcgacctcggcgcgctcgtcgagggtttcgacgacgattcgtgggtcgacttcaaccgcgagcagaagaactttggtgctcaacaggtgcgtactcttcacaggcgctccttcgtgctctcgtccaggctaggattgctgacgtcgctttcccttgccccgctcttcgcaggctatgattctccgctcgcagcgcgcctggacgccccggtccgagatcgagcgcctctactttacgtttgagaacgcggtcgacctcgtccatgcgagctcggtcgccccgcgcgactaaaacgacgcccgtccccttcgttcgcgccggctcttgtgctcgagcgaggtcatccgcttgcttaaatctcggtcttggatctctcctctactcatctctctctctctctctctctctcttctagaccatctctcgtttggggttcttgtatcgattgctctcacctttttgcgaacgcagggccagggccacagaaagtaacaacaagcatgtgagcggaagacggcggcaaggagaaggcgagcacgaggtcagtgtacagaagggcgaacggcatggggcgagagggcgagagtacaacgagagcggaagaaggagcggggaggatagcgagaggggcagggtgagaagaaaggggaaaagagggagaagaaaggggaaaagagggaggggagaccaataatgacagcctcttcaagtcggacctcaggcgaccgagccgagctcgctccacccatcgtcctcttcatcgccgtcgccgttcgcactcccgtcggttggcgtccagccacccgaaccgaccctagacctaatgcaagggtcagcgtcggctctcgtcggccggtcgacaaaaatacccgacgcagcggttgacgcgctggcgcacgacagggcaggagacgacggccgtgagggcgaggtggaatggtccgagccgttccagattgagtgagagccgccgacgtcgccttcggcgtcgccgtcgaccgaaccgggggcggaggcggaggggagcgagcgtggaaaggtcgacgaggagtcgacagggacaggtgtcgacagcgccgagggcggccaagccggtgcgaagaccgacgacgagaacgcagaggaggtagtagtgttgtccttcgtagcggcggtggaggcagcagtggaagtggcggcagtaggggcaacagtgctgggcaattcggcaggtgcgaagacggcccagctctcgccgagctcattccctgcgagcggctcgccgttagtcgatagggaagaggccgacgacgacgctcgtgccgaggaggacgacgacttcggttgcgacgcgtgcggtgcgacggtcgataaaaaattgaaggacggtgccggtgcgagaggcgagagatcaacgagcggctcggcggaatcgacagtcgttcctgctcctcctccaatgccgatagccgagcgctcctcaccctgctggggatgagagcggtccttgaccgccgaccacagaggcagctccgccgagcttctctggccggcaacgcccgtcaccgactggggcgaagcggagacggttggggagtgccttctgccggcgttctcgtcggcagccagcgccgccggtggaggttgagacgatccgaaggattcggaaacggaaatatgcgtgcctcgcgacgacgacggcgatgccggctggcggtccgggcggctggagaggagcgggtgctttctcccgttcggctcaagcgttgtcggccgaggtagagatggtgagaactggtgacggaagtgacgccgccggaggccatcttgcaggtcgccgccgcacgctctgtcgtcggcgtctgcaccgccatcatcgatgaggacgccgaccgcttcgccagcgagcagcggcgccacctcctccgctgggtcctcctcggcatcatcggtcccgctcccgctcccttccgaccgccgattgaggcgcgacgcacggactctgtcccgaagtgtctggggtgtaagctcgagcttgatggcctcgagctttgggccgaggtctgccggcgggtgggcgggcgaggtgggtcgtcagcgacggcgacaggtctggcggggggacaggcaggcaagcaggcaagctgacgcacatggatctatgacgagcagcttgagagtgatgagagctgctgggaggacgacgacgaggccgacggccgcgaccaacggcagggacggcatggcggcgggtgcgagagctgggaggggggaagggcaagaggatggtggagctcggccaggcgagaggaggtgggctgctgcgggcgcgcctctgggccagaaacgccaacaaaacccttttctaggctatacgtccccgtctggggaccgtcctccacgcgcctcagccccggcagcgtcgtccatcgccctggctctctcacatcaacgacctctcttcgcctgcctcttctcacttttccactcagcagcatgtccgaccctacgccatcaagcagcagcacgagtccacctccgccagcaccggtcgacgccaacgccgctgcctcttcctcctcggcgccgccaccgtcagaagcagcagcagcaccggccgccgaggaggagcccgaggatgcgttcgacgacctacccgacgatgtccggcgagcctcgcccgaggacgtccggctccaggcgcgtctgattgagaacgacatcaaggtaatgcggtccgagaacctccggcttcagcacgacaaggcgcagatggtcgaaaagattgccgacaaccggcagaagatcaagcagaacaaggtgctgccgtacctcgtcggcaacgtggtcgagattcttgacgtcgggctcgatgatgacgacgagggaggaggtgacggggcgacggccaacgaggacagcaaacgcgtcggcaagtcggccgtcatcaagacgtcgacccgccagaccgtcttccttccgctgatcggcctcgtcccggccgagaagctcaagccgggcgacctgattggcgtcaacaaggactcgtacctcgtgctcgataccctgccggccgagtacgactcgcgcgtcaaggcgatggaggtcgaggagcgcccgaccgggacctacaccgacattggcgggctcgacaagcagattgaggagctcgtcgaggccatcgtcctcccgatgcagcaggccgagaagttcaagacgctcggcatcaaggcgcccaagggcgcgctcatgtacggcccgccagggacgggcaagacgctcctcgcccgtgtctgcgccgcccagaccaatgcctgctacctgaagctcgccggaccgtcgcttgtccagatgttcatcggcgacggcgccaagctcgtgcgcgatgcatttgagctcgcaaaggagaaggcgccggcaatcatctttatcgacgagctcgacgcgatcggaacgaagcgctttgacagcgacaagagtggcgaccgcgaggtccagcggacgatgctcgagctcctgaaccagctcgacggctttgggtccgacgaccggatcaaggtcggtcgctgcctgtatgctacggctgcccttctcgtcgccaactgacatgcctgctttcctgctcgccaccttgacaggtcatcgccgccaccaaccgaattgacatcctcgacccagccctccttcgttcgggccggctcgaccgcaagatcgagtttcccttgccgaaagaagacgctcgggcgcgcatcatggagattcacagccgaaagatgaatgtcgggccgaacgtcaactttgccgagctcgcggcgagcacggacgaattcaacggtgctcagctcaaggccgtcgtgcgtctgccttcctcccttgctctctcggggccagctcgtcgcttttgctgacgccgctcctacttcgtgcagtgcgtcgaggccggcatgatcgccctccgcgaaggcgccaagatcctcgagcacgagcacttccactcgggtatcctcgaggtccagtcaaagaagaagaacgaccaattcgtgcgtcgccctttaatgtttgctagtgactgtcttactgttcggatgggctcgctaaccttctactgcttccggttgaacagtactttgcatgagcgcatcgccgccccctgtcactgcgccatccctcctttttgcgcgctcgtcgcacgatgtcatgcatcaccctcgactatcacatctgcttggcttacttgggatggagaggctggcagccgtcgacgccggcagggtgcagaggtcgggattcctgggagggctcgttcagcagattgagagcgtccgcgtgcattcctttaaaggccatgaatccgtctacagccttctggacagagcttgcagcgtctccttacgactggacagcgatagctctgaggcgacctctcctgcgaacgactcctctctgatgcgactcgcctgtgaggaggcgcgcagtcgtccgcctgcccggccggaacgacgaggcggcgagcgcgagtcccgacctgacctcgaccctcgacctcaatctcctcgtcccaacttctgctacttatcctttcaaacctcctcttaagcactggatagctgaatccggagacgcgcgcaagaggccgctgtcggaaccgccgacctcggacgccgctccggtcagtcagcttgccttccccacacacgcccgccggctcttccatcatcccagccggtcggtctgacgcctccgaccctctccttcacgacagaagcagacggccgattgctctcggcgaccttgtgacgagccccgatcgacatgtcgacctcggccgctcgcgacctggctgggccgtcagcccggctgccgttgctggctcctcctatgctggccgaccgccctccttcgcccgtcgactcatcctggatcggcgagtacgacggcattcccgagcataccggccagtccaactctggatcgaactgtggtggtcggaagcgttctcggtcgacgacggcgctcgagctatcggacgaagacgacgacgacgctgccgagctacgcggggatgcttgccttcaagccaatctcgtcccgctccaagctttagccggcccctcaaggtcaacgccagacgtccagctctcagagctcccatcgggcgtcgacagcggcggcctctggctgaagggtgtggcgggctctggcgggcttgcgagtcggcagccgctgccgtcgggcgcgatggcgaccgtcacgagcgcgactggggaccggcacaagcgccgacggtcatcaactgacagcgacgacgacgcagccaacgagaatgacgagggcgtcctttcgactcgagcttggatcgcctcggcgaggtcaggttcgggagtcggcgccggccgaaggctgcgacctgcctcggccgttgagcatcgcgccatggatgactacgaaccgatggacgttgaccttcccataccgacggcagacctcgcctaccagtcgacgatgcacgacactgggacctcgcatcgtgcacatcggtcgccgacgtcgtcggccgtgacctcgcccgctcgcccggcggcacctgcgcgcgtccgctcgaacggcggcatgttcagcccgacgagcggcggcccaacagccccgctagctttcacgacgtcagtccacgcttcggcttcggcttatcggtcgcgcgtcccctcggacttgtcgaacgcgtcggccgcaacaacggcgtcgtccgcaacagcgtcgtcatccgccctcccgctgtcgatgcgacgcaggccgccgctcgtacgaaacacgactgccgtcccggccccgctgacgccggcgatcaacaaccgcaacagcggccttccagacgaagacggcttctcctacttccggccaacgccgcccgcctccagggggcaagcggctgattggcctgacgtcactctccggcgttatctcgaagaagcctcgccgacgagcgtctcctccctcgcggtcgacctacgcacgcatgtcagccaagcccttcctcggcgtccgggggcgatggatgtctcaggccgactgcgcggttcaagccgaagcgccaatgagtcgtggctcggcatccggcggtcgccgtctccgcctcctgctcagccgacgctaggtctcgccgcaattgctacccacggacgcttctcgccgcccgtcacgccggtcgctagaggtggctctggcccgagcggtcggtcgagcgcgagggcttgggcgccgattggaggcgatgatgacggccacctcgtccggccgctgagtccgcccggatcgacagcacaaggcgtccgcgagcgtcggagctggttgagcgacgctcttgccgtcgagagtccgtcgattgcatcaacgtcatcaacggcgacaacgccgggcctcaggcccttccggcttcgacctcaggcggtgcgccctcttcagccagtgacgacgtcgcccatctcatctaccactgcccggcgaacaagcctgctcgcccagctcggaagcgccaacgaggccgaagaggcgctaggcagcgaatacggcccttcggttggcttctcgcgctcgcgcttcgacggcctgcacggtgggaccgaggctcgtcggcggtggacggccggccaagccagctcgccgactcactccggcagtacgacggcctcggcgacggcgacgagtgccttggacctcagaccggagcggaacgcagagtcggcgccgtctcagccgcagccgttctcggctttccggcccttcctgctaggtggtgaaggctcgcgcgagccagcggcaccgccaatgctatcattcctccggccgctacagctacccttgagcagcacaagcagcgacgcgcaagcggcacagctggccgtcagaccctcgccggcatcattgacctcttatcgctcgcagctcgcgccgcccgtcttgacggccgccttcagctttggcgacgacagcgacagcgagtcgtcggcctccgacaccggcgacgctctcccgtccgggcaggggcagcacgcgacaaccctgactccgcagactcggctgcccgtcatgctcgcttccggcatgtacgccgcccgaggcgagtcggacagtcccactggcttgagtgccctcccgtccttctcctcgacacacgcctcggactggtcgagctcgcttcctacgcctggcggtcctggtccagtgcgccgggtgccaactctccggccgttccgagcggcggatcacggcttcggcgagcggtcggcctcttctgcgacgtctgcaatcgatactcggcccggatcgtcctcgtcaccggctcttgcgcccttctcagccccgtctggctcgggcgccgcccacaccagcttgtcatccgaccaggcctcaatgagcacggctagcgtcgggaccggcgagcagcccatcggcgcaggctctcgcctcgccgagtacctcagccggcacagcgagcgtcggcgtcggctcctgcctggcctcgttgaggccgaggagcgtgaggctgaggggcaaggcgatgacgactggacgggcagtctgctcgactggttctcggcacgaccggtgagtcccgttccccagctactcgatgcaactgctctgacgggcgtcgatcatgccggagtagaactcctctgtcgaccctgcggaattgcagcaggccgaggtgcaactcgccacccgccgtcgccgcttgcacgagcttcgccgttcacgtccgcttggcgagccaagaatcctggcgaccggccgggaaccgtcgtccaacctggctcagaccctcgacgcccacggctctcgctcaaacagcggcaactccctcgagccaccagcggcgcccgtgccaacctcatccgtctgggatgcgctgctttatccttcgccgtcgacctcggtccctcgtccattgacggctccctcgactagcgcccctgcatcgcggtggaaccccatctctccggccgcggcagctgccttcgagccggggatcttggcgccagccaactcgcgagaggcgatcctgcaggagctcttgcgccagatctcggccgacctgtcgtccctctcctcccggccggtggcgtcttcgtcgacatcgcccccgttcactttccatcacgagcgatctggactctcacgccgtcgggacggctccggttggacgtcgatgacctcgagcggccagcagcatccgccaccgatgccgctcggcctcagcagcctcttctcctcgctagcctccccgacatcgacagcgctcgggaccgatttcctgactgaggacgagatcgacttttcgtacgagagtctgattgagctctcggcccgcgtgccagccgtcgtccgggcgacgcccggctgggtcgtcgagggcctgccggtccgcagctaccgtgaacaggcgctgaagggtgtcgacgaggtcgacaagcgctgcgccatctgcctggacgacgtgcgttctgctcgcctcggcctttcacaatctgtcgttgttgctgatgcccgctctttccaactgccacagtacgttgctcacgacctgacgatgacgtcgccttgcggtcacttcctgcacgagggctgcctcaaggttcgttccatcgctttgaaagtcaggcaggacgaccgctgacaggggacaaactctcttcctcaggagtggctctgcgctagccacgtctgcccgctctgccgcgccgacgtcgtccctccgtcgaccggcccatccgaatcgacggcaggcccgttcgccattcatgtcgacggggcttgacccgtgcgcccgtcacttctctcggtccctcttaatcctcccttgtctcctcgccttgtcctggcgcctcgccgctcgcctctttcacgactttcgctcacgacccctttcctcgggcgctcactcgctcgctcgatcccatgctcgcaccttgacgccacaatctctcgcaggcgatgccggtggtgtgcaccgtcgtctgctttcgagccattcggaaacgcttgcaagttaatcggccgctgcgccggagagaatcgatcgctgatctccccttcttgcgtgatccgagatccatggctgatctcccgttggctccgcgcgcgcgcgcgcaggccgatgggctcacacgactccctcctccctttcgcacagccagcccagtcgctgtcatcgtcgtctcttcctccgtcactccacctcccgttcctccatcagcttcgttctcccacccactcgacagttcatcgccacatctctcgagacacgatgcctatcgcaacgccttcgtacccgcggccgcttgaatcggccaactcgctcgccaagctcgcacaggtcgacctgacgccggccatcggcacagagttccctgccactgtctcgcttcgcgccctgctcgacaaccgacaggcgatccgcgacctcgccatccttgtctcgcagcgcggggtcgtcttcttccgcgagcaggacctgacggtcgaggagcagctcaagctcgtcgacctgatgggccgcgagactggccggccgcgcgagagctcgctgcacattcacccgctgacgagctcgaccgacgagctcggcgccgtcttcaagatcacggctggtgcgtctcagctcctgttctgcttctgagacgaggtggtctgtggcgacgacgcgagctcgagctgaccaagctgctgccttggttgcctccgccgcgttgcccatctgccctggatgcccgctcatagacttcaatgaagctggccataagctcctcggcaacgtctcgacaaaggcctccaacctctgggtacgtcctgtctgctgagctttttcctcgagcgacctcgaacccgcgcggcttcctttctccaagggcccgcgcgggccagccgttccgaccccttggattccgccgggctgacccgccaaacacgccgacggccccgaacccgccttccttcttcccctgacccacagcacacagacatctcgtttgaggagtatccgagcgactatgcctgcctccagatccgcgagctccccaagactggcggcgacacggtgcgtctctgtactggcatgagagaaagtgctgcgcggccgtcttcggcgctgaccggctcttcgccctcggcgcttgtctggagttttagctttgggcctcgtcctacgaagcctactcgcgcctgtcgccctcgatgcaggcctacctcgagacgctgacggcgacgcacacggcccactcgttcctcgagacagccgcccgggacggcatcacgttccgcgagccgcgcggccaccccgagaacaagggccagagcctgagcgccgtccacccggtgatccggacgaaccctgtcaccggctggaagggcctctacgtcaacaagttcttcaccaagcgcatcaacgagctcaccgtcgatgagtcggaccacctgctggcctacctctttggcctcgtcacagacaaccacgacatggtcgtccgcttccgctggaccaagaattcgctcgccctttgggacaaccggacgacccagcactcagcgacaaacgactatgcgcgcaaggtccgctggggcgaccgcgtcgtcagcgtcggcgagaagccctacctcgacccaaacagcatcagccgtgaggacgccctccgcctgacgggcgaggatgacgagtaggctcgtcgctcgaacttcgtcccacccacgccgcttcgaaagcggacacgatcttcctcacctcacgttgtaattcttaacgccctgccctgctcgcaccccgccgctccaccgacgaccttcacgacccctgcccacccgccatcgggacgacaccgacacccgccatagatctcgatgcgctcccgccctcaacacctcaaaagacgcggcttcaacccgccgttggctatgcatggcccatcttcctcagactgagctgtgggctgcttgaagggccgagggccggttggcaaagtcgttgcggaaggccgggcctttgtccgagcttagactgaagccggttgcacatatgcggcgatcggagcgctcgcagccgcaagcgaccgaatggcagggagcacagctcggcccttggccgaccttgtggcagccccaatggcagggtgactagtcggaggcctctggaaggcgagggttgaaatgggaagaaagcggacgagccaccctcttcagtcgccgtcgctctcgctttcgtccccttcctcgccgacaccggcctcctcgagcatctggtagcggtcctcctcctcacggaagagccgctttcttcgccgtcgctcctcggcctcgacgtcgaccttgcgctcccttgactgcgacttgtttcggcggcgtgtgaggccggaggaggacgagtcggtgccggacgacgtgtcgctgtctcctgcgtccttgccggatctggcaccggcttcgtcctcgtcctcgtcctcgtcagaggacaaagagtcggagctctcttcgggggcggcgtcgtcgaccgagggaagcgcaaacttgacgacgcgctcgtccatctcgggcaagtgctcgtcgtcggacgcggcgtcaaagtcgagcgcgccgccggtgatgtctgggtagcctgccgcggtcaccgagtgcttgatgaactcctccatcaggatgcctgacaacgggacgaatggcaagacgcaaaggcaacgttagcggaggccggcgcccgtccaacccagcaggacgcaccgagcgcgatgagcgtgtcgccggtcagcgccttgtacatattcttgcgcgtgttcgatcgtcctctgtgcttcttggccgcgacgccgtcctcctgaccggcactggcgacgctcgtgcgtgacgtctggcggcgcagactatggccagaccgcgacgagcgccgcgagcccatcgtccggtccgagccagcgccgtcgtccgagctgtcgagctcgctctcgccgtcgtcgtcagaccccatccggctacctttgtccgacaggcctccctcagacccagggtggtgcttgcttctgcgccgtcgcgcgtactcggcctcgcgcgcggggtcgagcaggcggtggccaatgccgccggagtgctcgcgcgagtagaggagcgtcgcttgccgatgaatgtgcttgagaaggtcgtccggtgggagcgcgtgctcgtgtgctgtccaagattgaaatcgagagggaagcagcagggtcaggagagtgtcaacagacgttgacaaccagaccaggtcgtgtcgcgacgcacctgagggctgctgcaggtactccctcgagcggtctgaggcctcgcccttcgggcctgagcctctgccctgactgctcgcttgcggaccgccgccgccgccgccgtcgccgtcgagagtgaagtcaggctccgacccgccgtcgtcggctgcgaggtgctgctgctgctgccttcgggagcgagcccggtaagcctccttccggccgcggacgacgcgagcgtcctcaagcccgaagacggtttcgacctggcgtttgctcccgagagcgagtgactggggcgaagcgatcgtgtacgcgttgatcttcatgctgccagctcgaggcaggcgaaggaaaggcaagcaagtcggaacggagggtggaggtaaagggtcgagagagaaggcgagctgcgcctgccgtctcgtctcccacctctgaccatgacccacttgtccggcgacggtgctgatcttcctctttcatggcacatagctgacgtctagcatgcctgtgtgcgacagctcatccactttgaatcgacctcaatgctacaccggcctggtcctcggccctcggcagcttcggccttcgccgcccagagtccgtcgagccggctcccttcccggccggcccgggcaggccagagcaaagacaccatcgccgattcggtcgacgatggcgcccacgaggagccgcccgtagcagccgagttggctggacgttgctgtcggtcgtagctctcacttcctcgaccatcacaccggctcgccttcgttcgcccttcacacgcacacctgccccccacgatggcccagccctacaagcagcaagccgccctcgagtcgacggcaacactcgtcaacccgcctcacggtcgcccagtagccgacgagaagaaggagaaggtcgactacacgaacctgacgccggaccagcgcgcccggtgggaggcgagcctcgcccgcaagccgtcgggtgcgagtcggctcggcgagattgtgagcgggctcgcgacggccggcttgtacaattgcggcaagtgacctcgccgcgagtgctggcttgcgggccggcagcagtcagttttgcacgtccttggctctgggtgttcggtcgagcagctttggaggcgtcaggcgtcagtgctgactcctgttcctcggctgccgcgccccagtcccgcattcacgttctttttgtagctccccgcctttgtacgaccacgctcacgtagaggacccagtttctttacacattgtcgactcctcgtcagtcaaagcacaagagacgggcgacgccgagaagacctctttgtggacgtctgcttctcggcttctcgcgccgcaccgcaccgcacgccctacgccgagcttccgtgggtgagagagacagcgcgaccgacgaccgccgcttgagaatctcgtcagcgctctgcgccgtgtcgtgccgcacgaaggtcagcgctttcgtcgctgaggcgggcaccgcgccgcctcgttcgcggctttttcctgctcggccggcgccggcctgtcgacgcagacgaggtcatcagcacgaccagaggaagatctacgtcggtcagcgtctgcaagtagccaagggggaacgctcggccggctcggcgggaggcgcacgacgcccactcttttggccgtctgcgtccgaagagacgacgtcagttcgtgacaacgccgccggccgtcgttgcgcgcgcacgacgtcagggccgggggtccgaacgtccgagggagaggcggcaggctctcgtcggttgctttcgttcggccccggctgacgccccgcgatggccgggtgcggaggaggaaaggcgagggcacgaccgacgacgtcacggagggtcgaacgtctgctgcgcgaacaatgggctcgctcgcagagtcgcctgtcgccctgtcagtcgccgagcggaacgagcaggacatgaagaacgcagacagagacgagcgtgttcaagcgtcctgagcaggtcgaggggcgttttgacagctccctgactgtcgccagaagactggagccggcggcaagtggcgaggcgtttgtttggtccagtgacgcagcctttcgtttgcggctgtcgacctccgagcaggcgagcgcacttgccgcatctcttaaagatcggagggaggagcagagaggcacacccttctacccatcacccacgtactcatccaacccaacctaccctctctcaacaactttgtccaagatgcccgccgagtgcgtcctcctctgcgcccgtcgccctcgctgcgagcgcccctccgaccgcagatcgagctcgtggctgactgactccttggccttgttttccctcccttcttccaggcagaagcccaagcccgacatctcgtactccgtcaaggacctcttctcgctcaagggcaagacggccatcatcaccggcggtggctccggcatcggtctcgccgtctcgcaggcctacgccgaggccggcgccaacgtcgtcatgatctacaactcgtcgccgtcggccatcgaccgcgccaaggagacggccgaggagtacggcgtcaagtgcgtcgccaagaagtgcgacgtcggctcgtacgccgacatccacaaggtcttcgacgaggtcaccaaggagtttggctcgtacgacatcatggtcgccaactcgggcgtccagcagaacaacccctgcctcaccctcaagcccgaggagtgggaggcaatcatccgcgtcaacttttccggcgtcttctactgcgcccagaaggccgcccaggacttcaagtcgttcggcaagcccggaaacatcatcgtcaccgcctcgatgtcgggcgtcatcgtcaacgtacgtctttgtcgcgagagacgagagagtgccgtcgctgaccgtcttcgctccgtcaccctttgccttcgccaggtcccgcagatgcaggtgcgatcgctatttccaccttccgccgccaccctctccattcaaccccccaattcacctctcccctccgccgcccttccctcgattcatactgacgccgcccctttcgcgttgctagggctgctacaactcggccaaggccggctgcatccacctcgtcaagtcgctcgccgtcgagtttgccccgcttaacatccgcgtcaacgccgtctcgcccggttacattgacacggccgcgcccccgcccgagtgcattccgctcaagcccatctggcacgagcggacgcctcagggccgcgaggcggacgtccgcgagcttaagggcctctacctctacgtgcgttccttccaataccggtttcagcactcgcgtggaatttcacgctcacggcgtcttcttacccgtctcgcagctcgcctcgaacgcttccacgtttacgaccggatcgaaccatattatcgacggcggctactgctgcctctgagcccactggccagctcaatcaggaccgactttctatgtatcgataacctttttgcttcgctcacacccgcgccgagaaccctttactgcgagagaggccatgctttgaaaaggggagatgcgataggtcatgctgagaagaggggagatgttcttcttgcctctactgcgagggaggagggaagatgttcggggaggagccgtcgcgggcgggctgcgcgtcgatgccacgcgtagcttcccatcatcgccatccctgatctttgccattcccttgagcatgccaagctgcacatgttcgctttaaatgaggtacgtcttcctcagtttctgtcagtgcgaggctgctatgcatgcgtgtggtaaaatggcttccgcggcagccgtgcgcgcaccctctcgctgcccttgcctccgccgcctgtcgacttcgaccccagtgctcctttccctgctcggctcgttctcgtcagagcaacgccctcatagtacatctttcatgaaggtcggtgcacaagagaactggaggacgaggcggttatccgtctgccaatcggtcgggcgggcgcagcgagttgcggcgccgacaaacgatgcgagcgggcgtgtgatcgatcgtccttcaggttgagtcgtccagggcaggcggaatcttccgtcactcaagttttcaattcaggcgcaagcatgtacaacgtctaatcatcaaggatctcgtccatcaagggtctcgttcgacacggagggtagggtcgtcaagaggggacagaggcgagctaagagaatgagagggcctcagcagaagaaagggccttgtcagggcgccgttgcactcgtccgatacggcggcaggtactcgccgtcgggcgcgagccacttgtcacagtcgacgattgaggtggccgggccgaaagtcgtcgtcagggttgaagccgacgacgacggcagactcggatctgtcatgggcatgccgtgcagctggcgactgcgggcgatgatcgctggcaggcaggcgatctacagtgtaaggcggcgtaagcgaggccagtcgcgttggcggatagaagctcaatggaggaacggcctggacgtaccttcagctggccggccgcacgctcgagctcgtcgaccttggagccgacgtgcgccatcgtcgtcttgccaccgcgggcaaacttggcattgatgtagccgttgacgatggaggcgatgtgggcctcgtcgaccggcggcggatacgttgagccatctgtgtatgaacttgactccgcggctgagcgagaggagggatcaggctttggtcgcgcgacgtgggaaggggggcagctcacgcgcacctgcttttaacagcgccttaaaggcgagggcgaacgtgctataggacgagctccgggagctcgaaggagcgggatgcggaggcatggtgcctgggcagagcatcgaaggagctggttgagggatgatgagggttgcgcgtgagcagaaaggggaggcaaatgagagatatggctaagttacgcactggagagagagaccgacgtcgaggggctgtggaagatgggaagggagcaaagacgtcttgacgcggtcgttgcttgacgcggtcgttgccctgacgcggtcgctcaagagtgaccagaagtcgcaccactggaaggcaggaaggccgggtcgacccggactcagtgtcgtccgaatggacaccagagatgactacttgagcatgctgatgactgggttgcgagccggttggtcaggtttagaggtcaataagctgactgtccggagggagcggttcgcagcccgcagacgagtcaatcgcagacgaccggctccgggcctcggctttccccgagcatttggccgccaaacaaagaccacgaggacgcaggcgagcgttgccgaaatagaatcaacgctgcaggccgtcgctcaggaagcgaagaagcgtccagacagacgacgaaagcagggcgagcagaggaaagaagaggcaaagtcgtattggcgggcggtctgcgccttgaagccgctgccgccgccgtgcagagccgacgtcagccgcacgtcgcctcagggccgaccgttgggcaagtgcgagcttgccagttgtctgaacactgccaggcccggagcgtctctaaagaagtcgtgtcataacatcgtgaatgagaacgtgtgcttgctcgagggccgctctcaggcttatgctgctcgacggtcgacccgccggttaacgccgccgaggaggatcttccgcaggagcttgccatctggctcgtcgagagtcgcggcctctggtggcgcgtacattacagtgtcgacaatgtcctggcgagggaagacaaccggacgtcagccggccgcaagaaagtagaggtctgggcctgaggcaggccgacccaacgcacccgaatctcgtacgtccgctggaggctctcgtcgagcgcctcgaggtactcacgcgcctctccgtcgtcgccgacctggaggaagaagatgccgagctggccgagcggccagtggcccttgtcgagccggcgggcggcggcgacaatgaccgactcggggtcgtcggacggcgtgctgccggcggggtcgatgaacgggttgtgttgcgggcgggcggcggagggccgggtcagcctctgatactctctgcggcagggcggcggagaggggaggtgttgcgatcaaaaccaggcccctcctcgagtggcagccagcgtgtgcgagaggaaacgtacccgtccgtgacgacgatcaggttgagcggctggagacgctcgacctcctcggccggatcgagtgtagcgacgacctcgcgctcctgctcgagccggccgagatagtcgagcaggacggcctcgattcttgcccccagcggcgtcacaccgcccggctcgcctcgggcctgaaacagctcgtcgacggccgctcgactcgcaaggccaagcgcagcaacctcagaattgaggaagcggatctcggcttcggtctcgacctcgccggcgagatcgacgagcgccgcgagcaggcgggccgtcagaggccagcgcgaggccgtcgtcatcgaggtcgagtcgtcgacaaggatgacggtccggtagcccttgagcagccggacgggatcctcgggcccgatcgaggacgacgggccggagcctgcgggcggcgacggtgcctggcggtcggctggcaagtcggctagcggcggaggcgtaaattgcgtcgtcgacgagggtgcggcagcagctactgctcctgctgggctcgacgacgacgcaaacgatggtggctgggcctgcgtcgcctcctgctcgccgccgccgctactgctgctcatggcgacgtcgcgctcatcggcgaccggtgcctgattggccatctggagcgaggccatgattgcctggatcaggtcggcatcggggttggggtcgatacgctcatagacgggaggcggtgtcgcccctccgtccgtctgcgtggtccgctggacgggtgctctcgaccggcggggtgcagcggtggacgagccgcttccaccgccggacgctgctgccgatgctcccgctgtagtctgaccaccagccccctcccgacgcgagcccgatgaagacgacacggcgaacgtcgtcccggcaagcggcgccgacatgtgcgcggccgacgtcgcggccgagatgtagatccggctcggcggaaggccgagctcgcgccggaccatgatgagcggcgcgccaaaatttggaaagcgcattgcgacgagctcctgctcgagcatgtcgagcttgtagccgacctccaatctggacttgccctgcggcatgagcagggagggtgagcgaccggtcagcttcgtactcgtctcgggtgcgagccggccgcctcgccttggccagcttcccctgcgcgtacgacttgatgatgagctttgcaaaggacgggttgatcgccgctcgttctgctcggaccaggtaggacagcgtgcgaccggcagcaaacggaaagagagcacgacgaggagcaccagaggtcagcgcactgatgacgacgccgtttgctgcgggagagaccagcagcagcagcaggctccggtgcagagagaagaaagggacggacggtcggcgagcgcactcagggctgcgatctgggtgtcgacgagaacatggggcgcgtagctgtaggcgctgccgctcaggctcgacatgctgcttcgaaggaggtcagggcgatgacgggtcggacgacgacagaggaggagccggccgggccgcctctcggcgaattgatgcagcgggaggaggtcgatgcagccgggcagggtttgaggcctattcgcaggaggccgaagacagtcgcagcccatgcggcatcccgcccgttttgactcctccaacgctcgctcgctctcggctcccgcggcctggccggcctggacgagagaggaaggctgatgacacactgacctgcccgtggaaagcgtccacgggcatgctcggcactgcgccgcggcgacccttgcccgctcgctcctctgctgacagtcagacggaaccggccgaccgggtcgacctcctcctcgcttgtagctctggccgctaacgagcccggccgcctccctgatccggcaggctgctgactccaacccgtagaagacggccatgagtcttcgtcggaaggccgttgcgcagcaactcctctcggcgaaggccgtcctcggctcccccttccttcgctccggtctctctttttgcagcttgtcggagacgaccgagctctacaaaagggcaggggtcaggacgagagacttcagcccctcattcacttcccctcgccaccacccaccccgtcactcgaccctttcctcctccatgtcccgccccgtcgacccctccgccgtccccgagctccagtcgcaagcagacgtcctcggcgccctcggcatcaagtgtctgtcccacctgctgcctctgctgtccaaggcgctcgcctgacatccgccctctcaccgcctctagtcaaggccgccgagccagcgtacgtctcggccgtctttgcgtcatatatcaagcggaagcaggcccggggaaagaagcccgagcaaatctcgaaaaagctcgacgtcctcgaacgtgcgctcatcggccagttgaatcaggtacgccccaaccctgcgcctctcccctgcccggcgatggcgactgactcttcctttttgcgtcgacagtatcccgactttgcagcccagattgccctggcccgcgcagccttctcgctcccgacaaccgactcgagtctgccctcggccgcacatggcagcggcaaggccggcgcgtttcgcgactcgacgctgacgcagacgacggtcgactcgagtccataagcgaaagcgggactcgctcgaccttcgcttgccttacacccgcactgtataaattgcaccccttcaatcccgtacccacgcagcctgcgagactgcgcccgcagacggctcgcgaaacgtcgcttgcgagtcacttcagctctgcaaaccgactccaaagatagtggcactagtgttgctctcgcctcgcttcccgtccgaccatcatgccgtcgacagtcgtcttgctttcgcatcattcgacccgcccaggcgatgaatcgccggcgaaacgatgacctacttgggtgagtcatgtgcggcccttgctctgttcgggtcccgttgaaagtaatctgactgcaaaggagccgacgtgcgtggagcgcggctccttcacttgccgtcgcttcggagccgagacgtcgacgctcgcttctctcaagaaggctgtaagcagagcgaggaaagcagggcgatctcaccaccttcttttgacctttgttgcttcctttgacctgtgcgtcgatgaacacgcagaccgacgtcctcctcgctctcggccgtaaaggtccgtcaaccgacctcgtctcggccaacttcaagtcggaccttctgacaactgcagcgttaagcatcgacagacagcgacgtggcccgctgccttgaggcgtacgtctacggcaagctggttcgaggcaagtcgcccagggattgcgcggccaagctcgatctcgtcgagcattgcctcgtcgctcagcgtgtgcgtcactccctggtctcccatcaaaggcaaacagaccctgacctgacggcccccatttgccccggccctcgctagttcccggactggtcggtcgagctggcgaaggtgcgacgagcgtttgcgctcccgacgacggacgacagcctgccctcgacgcgcgtctccctcgagtcagacacaacgcgcatcaacaaggtcgatagatgacactccacccagcggttctctagaggtattcgttcagaacgtcccggagtagtggccggcctttaaggatggcctcctccgaaagccgggccttcttcggcacgcgtgacttggtcggcgtcaggccgacgacgttctcgtcccgctcggtggtgtcgaccggctcctccttgatgctaggccgcttctgccgagctgaaggcggcgtcgtcggggcgagaggggtgtcgagattcactgtcggcgccggctggtcatccggcacagccttgaccttgcgcaagaccgacagctgccgatgctgcgagcggacattaggcggcaggtcgacgacccacgcgctggcggccatgagcgcgaggaagcgaccgaggagcggatcggctgcgagcgtcgaacgcgagccgacgatgacgagcttggctttcgcccgggtgaaggcaacgttgattcgcctccaatcgcggagcagctcgccgacctgaaggaggggtttgccgaagcggtcagcaatagacaactgggtaacgctccagctgtcgagatcgtaacgcacggagccacggtcattgctccggaccatgctgacgacgacgcagtccttgtcgcggccttgcgacttgtcggccgtaatgatctcgacgccgtcgatgccggtcgcctcgagcgtgtgctggaggagcttgatctgctggcggtagagggtgatggctgcgacctgatccggggcaacgccgccttgcaggagcgcttgaacgaactgagtgggcgacaagtcagcgaggcaggtcaatctggactagtgcaaggagctgcggaccaaccagctggacgatggaggcctcgccgacgttctggacaaggtcgccgatgcgcgattcgcttaggccgacgaggtcagtattgaggaacactgccttacagctgacaagggttttaaggctcagtcagagatctcagagatcaaacgatgaccggccgaaaccgactcgacttacgaaggatcgaggatctgctggagccagtcccgctgccctcggccgtcccacgcgacgtcgtgggccgacttatcgagagcggccgagagctcggcgcctcgaggcacgtcgagcgtctgggctgcgacgcgaggattgccgcagtggaggccgccgtcgtagatgagcgcgttcgaaagcgacatgatgtcggtgttcatcctgtactggtgggcgagcgagaccgacgcctcggggtgggcctcgtgcaagagccggaagagggacgtctcgagcccgcccttgcgagcggcggggtttttgacctgatcgaggcaccagcggaggcgtcgtcagtgactgtcgtcccttgcggaagagagcgggacagtgagcaacaagaagaacgtaccagcggcggcagttgaaagtggtcgccgacgaggacgaaggcctttgcaaagcggagcgggccaaggcaaacggggagcgtgatctggctcgcctcatcgacgatgcagtagtcgaattgccggcgggagaagagcgggctgacaagagggcaccgaggtggtcagagtacgctcggagatgggtgcaagcaggccagactgactggtcgatcgagagcgcggtcgtcgcgacgacctggggccgcatcagccgttcttcgtactgctccatgctcgcagccgggccgagggcgccgagcgtatacttggcaaccgtcggatgaacctgcagcgaaagaatcgaggtcagccctgcccatcattcggcaggttacaggagcgccgcaccttgtccgggttgccaagccggagaatgtcaaccccaccggcagtggcgagcttgccgacgatcgcgtcgacggccgagtgtgtgtagctcgtcaggaggaccgacttgccccggccgacgagcgcccggacgacctcgacgacggtcgtcgacttacccgtgcctggcatgccgaggatgagcgcataatcgcgggcggtgagaacgcgcttgatagccgcgcgctgatcggcgttcaggtggaccggaagctcggccggcgtcggagcgagcaaggggtcaaacattggcggtgtgaggttgacgatgagcgaccggagtgaggcggaggggccggccgaggccgtcgaggccaagaagagctgggcgaggttgtccctgatccggcccatgccgaacgccagctcgtccttgtcgatccggaagcgcaaccggccggcgctgctgctgcttggccgaccagggtcgagccgggcgtcgaggcgctcacgcaagacgcgctcgtcgagctcgccgtcgagaccgacggtgaccgtctcggcctggaggtcaagcacgaagcccctggcgagcgagacgaggcccggctcgagcgagatggcgattgggtcgcctggcgcgatgtggcccgacaggagcgatcgagcggcggcgagcgaggcggacggcgtgcccggcggcaggtcaaccgcacgcgcaaagctgtaggtgtgccggtggatgcgagcctttttggcgcctcgttcgggggccgacgaaacgatcaccatgtcggcgaagcagctattacgttcgaagcgaagcacaagacgtcagtctgacccttcagcgcttagcgctcgacaagcccgcagacgcaccggccctgtttctgccgcttagcggccgtcatcgtccagatctggcgcccaaagcggctcgcgctctcctcttcgagagtgacgagcgcctcccagcgccggaagaaggcggccgccttgtcgtcgaggctcgccgtcttgcgtacgtagaggtcggcgatgggcgagtcgacgtcgacgacttgctcgacggcctgccagcgccaaggacggaggaccgagtgtcaggcaccaactcacaatgaaggcgactcggactacggaccttgcgatagagcatgcaaacgtcgacctggtagcagcgcccgcagtcgtacgcccggtcgatcgtctcgggcagtctctgcgccggctcgtccgccgcatgcgcgtcgtcatgggctgccaggagcggctcgcaagcgagcaggtcgagctcgagctcggtgttggggtaagagtcgtcttcgtcgtcctcgtcctcgaggacgatcgcgagctcggccgattgaccgccgccgctgccgccgacgtcgtcatggaccgccatcggctgctgctgcttctgcgagcccgcagatgaagcgagctcgaccagccccttgcggccgagccagccggcaaggacgtttcgtcggcagacgagcgcgcggatgtcgcgcggctcggcggcaactttgtggacggcgttgggctgggtgtagtagaggagaccggcggggacgggcgtgcctgaggacaagagggaggagtgccgagaagcgaacaagggagtggtcagtacaggccgaaggagggagagtgagagcgaggctaagggccgcaccgtaccgctcctccatcagcaggcagtagacggccgtctgcgcccgatgctctgtctggccgaccgtccgccccgtcttgatctcgaacggtaccgccctctcctccccctccatctcgcgcaccgcaccgccggccttgcgcacaggcgccggccgctcgagccggacgtgcagcgagaggtcgaccttgccctgaaggccccagaggggcgacctcaggtcctcctcgatcgcatggaggccaacgaccgtcagccgctcggtcccgccctcgccgccgacgagcaggttgtcgacctcccccgcggctggcccgccgctgctgctgctgttggaggaccgaggaaggaagcgtttgccaaaggggccaaaggccgcgagggccttgtcggcgagctcggatccgacctcggcccagtcgaggtcggctttccagacgtcggcccggatcgcgtcggaccggtcggcgtcggcgtcggcgtcctcgccggcgatgacggggcctgcaggagcggtgtcgagcgggctggggttggcgtgagcgtcaggcggcgtcgagggcggctcgccgagtgccgcttggacagcgcgggcgatcgccttctttccgaacggcccgtcgtcgtcgatatcgtcggcggtgggagcagtgggagcgtcgctcctgactgaagacccggcgtcgccttcgccgtcgaccgtcggaagcgtcgacagcgtcgcgccgagcacaagcgtctgcgcgacctgatgcagcacgttgccgtacaagagcgccttgccgcctccggcctgcttgaccggcctctcgggcatctctcccccctccccaccctccgcctctgcagcgccggcaagagcgagcggcccacttacgccctcccggacaagcgagcgcaggatggcccgccgcggacaggagagggacgtcgcgagcgaggtggcgggcacgagccggtctgggtcgaggattaggagattggcggcgtgcggcgggcgggaggagagggtcaggcggggcggatcgggcgaggccgggccggaggtgatatccaacgtcgccgtcggcgctgagggagcgactgtcgtcgccgccgcgaagagcgtctcgagctcgggcgaaagaacgttaatcgtctggccctcgtccgggagcgcgatcggctccgccgcccactcgtcaagcagctcgagcacgagcttggtgcctgacaggcggccggccgaggagcgtcttgctgtagactcgctgctcggcgtcatcgcgcttgcgcgtgcgtcctcgccgccctcgcgcaagaggtcgggcgagcaaccgacgacctcaagcacgacctcggctccgccccacgcgcctgggagggccgtccggccgaggactttggcgcggatccaggatcggggccgccagctctcgggagaggcggtggcggcggcgggagaggagacggaggtggaggatgtgggtcgagcgacgggcgggcggagagcaagcaccggccgggcgggctgcgagcaggcggaaggtccgagggtgcaggggagaagaggattggaagaggagcaatgcgaacagcgagccgggtcagctctttggagggaggaaggggagggcgcaagcgacaggaggctggacggacctgcggcctggcgactgcgcgcttcgtcgtcgtcattggcgccggcgggaaagtgctgctgcccgcagcccagtcgtcgtcgtcaaagtcgtcaaagttgacgccggcgaggaggtcgtcgaacatttgctgctgctgtggtggcggttgaggctgaggtaggggcagcggggtgatggtgaaggccgagtgggaggaaggaagccgcgcgggagtggcagcgggcgtcgagcgagaaggcttgcggtcgtcctcaaacttgacagagagaggtgtcgagcggccaggcttgccagtcaatgctgttgctgctgctgctggtgtcccagcggcaggtcgtgctcgaccgctggtgtctcgcgagctcgagctcacactcgcccggggcggtttcgtctcagccgccgcttctagttgcgacaggggcgacgacggcggtgcaaagagctcggtcgggtcgagatcggccaggagtgcggccatgaaggcagcttcgtccgctgtctcggctgacatggcgggctggtctgtatagggtgtaacaggggtgacaggtcgacagggaggcagcggaggacgcgactcagggggagggcgaggcgcgtcgttgctttgatatttttctgttgttcagcgccgagccgcgccgagtcgacgcgagtgctctttgtcctgtcgctcctgtctcttcaacgacgtccttcttcactctcctctcttcctcctcttcttcaagcaccaccgacactctttcagacccactcactccacagccatgctcgccctccgctccttcctcgccctcgcctttgccacctccggtccgtcctctttgcgcccgccgccatcgcctccctctcgcgcgcgcgtgctgacccaacttgcccgccacctcccttttctcctcgcctcccgctagccctcgccggctgcacgcgcgagtacaccgtccaggccggtgacatctgcgactcgatctgtgcgtgcccttgtctctctcctctttcaagtctcgctggatgggtcgagggcggtgcaggacgggagggaagggccgttttgcgccgcccggcccctgctcgcttcgccttcccttctcgtctcccctctttcttctctcgctcggccgcacattctctcgtcgctccatccaccctgctctcctccgtcgctcgctcgtctggcgaatgacggatgggtccaggatgcgcgagagccagcctctcgcccgcgctggcttttcctcgctcggacgcgcgcgcgggccagccaacaaagcgaggaagacaaagggccgcccgcccggtcgcgtcgtcccttcggcctcttggctcgctcgcgtcctgtcgcttctgctcgcccttcttcgaccttgtacatcgctcccttgcgatgtgcgctgtggaggtggtcccgagcaggactcgtcggtcgagcgagtctagccgccgagccggcaggaccgtcaaggcttggcaaaagcctgtcgagctcgcctttccctttcattcatcgctctgcctttgtcctcacctctcttcgaaagactcgctgacgacctccctctccgcccgcctcttcagccaagacgcagaaggtctcgaccttccagctcgcgctcgccaacaacgccgtcaacgacgcctgctcgaacctggcgattggccaggtcctctgcctcgcgaccgacgccgcgaccgactgcaagcagacgtacgtcgtccagggcggcgactcatgcgagggcatcagctcgagtcggggcctcaacgcgaccgtcctatacgagaacaacccccaggtgcggacccgatcctctcgctctctcttctgtcatcggccctcgctaaatcgctcgcatccgctctcctagatcgacgccgcctgctccaacatctacatcggcgaggtcctctgcgtcgcgaccgagcccctcccctacccggagacggtcacgatcgcctcggccgaggcgccggcctaccttgcgagcgcgagcgcctacgaggagctcgagtggtgcgacgacgaggagtaacgcgcaagctcgctccttccgccgtccccttgctcgtttcgccttatcgctccgacccggctcacaggcccacccagcgggccctccgccccgccaccgccgccgccgctccgttcgtcgccgcccgccgcctcgtctcgtcctcgtcgacctcgtcctcgcacgcgaccccttcgaccctcccaaagcactactcgaccctctcgtccgacagcaacaacggcaagatggcgcccgtctcgatccctatgcctaacggcgactcgcccgccgagccgcagctgacgatcgcgcccaagggcgagaagagcagccgcaagcactcgaaggtcgtcatcatcggctcgggccctgcaggccacaccgccgccatctacctcgcccgggcccagctcgaccccgtcatgtttgaggtgcgtccgggacgaaacgaatcttgatagttgagacgtgcgaggcctcgttcgtcatgctgaccgagccgaccctctcacgcgcgcacgccacagggcatgatggccaacggctttgctgccggcggccagctcacgacgacgaccgacgtcgagaatttcccgggcttcccggacggtgtcctcggcgccgagatgatggacaagttccgcgagcagtcgtacgtccggcgtcggccgcctctgctgccttgcctacggcgcacgctgacgttctacctctcctctttgtcgccgactcagtgagcgcttcggcaccgagattatcaccgagacgatctccaaggtcgacctgtcgcagcggccgttcaagtactggcgtgagggagaggaggacgacgcctcggcgttcgagacggccgacacgtaagtcttgccggattgccggcgcagcgcgcggccagtcgctgacgacctggagtgctgctcttccagtctcatcctcgccaccggcgcttcggctaagcggctgtatctgcctggcgaggagacctactggcagtcgggtatctcggcctgtgccgtctgtgacggtgctgttccgatcttccgcaacaagaagctcgccgtcatcggtggcggtgactcggccgccgaggaggctatgtgtgcgtgcctggcctcgtcgtcgcagccgacaccttatctgtgctgacggcgctctcctgacctggccgaccgacagacctgacaaagtacgcctcgcatgtctacgttctcgtccgcaagggcgagctccgggcctcgcgcatcatggccaagcggctcgagaaccaccccaagtgcaccattatgtggcacaccgaggcgaccgagtgcctcggcgacggcgacctgctcaacgccctctcaatcgtcaacaacaagacgaaggaggtctcgaagcttgaggtcaacggcctcttctacgcgatcggtcatgtccccgccgtcgagctcatcaaaggccaggtccgaaccgacgaggacggctatatctcgactgttcctggccagacgcaaacgagcgtccacggagtgttcgcggccggtgacgtacaagacaaacggtggcgccaggccattacgagtgccgggaccggctgtatggctgcacgtgcgtctttcgacagcccttttcgctacaaatgttccaggctgacccttgatgttcccttcagtcgaggccgagcgcctgatcgccgaggaggaggagggcgctgatctcacggacgataagacgggcgcccgcgcctgaacggcaactcgctcctaagcctccctctagatgagctatcctctcttactcgatctgatgagatccgccctacgcccgagagccgaaagccaatgacaccttgcagttgcgagccgtcctgacgcgctgctaccgtcctggaggaggagcgtgtcgacgagtcggatatggatcggctgcgcgtgcgcgagcacgaaacgcgacgctgatgcgggcgcaaagcgaattagcccgctcgcccttggccggccctcgaccacgacctttgctccttccgtttcgtgccacccttttcctctgctcagctcgctctggctcggagcgacgctcctctactccgtcctttcagttccgcggtccaacggccctcgtcgcgccactcgcgtgcgccacctccctccccggcgctcacctcccggcggcgagaccacagccccttcagcatgcccagcgaaacgacgccgctgctcgacccttctgctggccggctggccgagcacgaagactctgcgatcgacatccggatccggcgcgacctctcggacctcgttggcgggcacgacagcgacgacgaggacgagtttgtcggccggtcgacgtttagccaggcgctcgccaactcactcggcgacttgatcgggacgggcctgctcgcgagcccgctggcgattgcgtacgctggctgggttgtcggaggcggcatgatggccctgcttggtttcatgacgcacaggacgtacgtctggcctgccgccgctgcctcgttgctgccaaggccggaggggctgacggtcagctgcgcgcaccatacttgccttcagactgctcgtcctcgtcaacctgatgctctcgcaccctaagcacccgttctcgtacccggacatcattggcgtctgcttcgatcaccggtacgtcacctgtctagccttcgtcgccccctgcatgggaggtgctgacgtgcgcgctctcccctgctgccggcagcttcaacatccggccgtacctcgcggcgcttttcgtgttcgagtgcgtcgcctggacgatggcgctagtcgtcctctacgccgacacgctcgcggccatcttcccgcgcttctcggccgacgagttcaagctgtgcgtcgccgcgtgctcgccgtctgtcagctttgagctgctgaccgtcgtgctgatgtcaagagcgcccccttgccatgcccgcagcttctcccttttcatcctgacgcccgtcgtcttcctgcccatgcacctcctctcgttcacgtcgatgctcggcatggcgacgagcatgtcgctcattgccatcgtcctcctcaacggctttacgacgaccgtctcgcccgggtcggtcctccacccgatggcgaccgacctctggccgacgttcggcgcggcccgtatcggcgtcagcggtgggctcgtcatgtcgtcgtacggcggccacgcaatcatgccgacgagtgcgtaggctctgctgcttcctgcgcgtcgatgcgcctctgcgcgaaccggggcctgactccccccctctcatcttgcctttgcagtcattcgcgacatggccgacaagacgcgctggcgccaggtcgttgacatcagctatgtgcgtggcttatctgttgccggcagagcctcggcgcgcaacgactgacggggtccctttcacctgctgcagatcatcgccctcaccgtctgcgccgtcgtcggtgcctgcgggtaccttatgtttggccgcaacgtcagcgacgaggtccagatcgacctggcctcgctaaaaggcccgctcatgtttctcaacgtctttgcatcgttcagcgtcggcatcaactcgctcactaaaattccgctcggaatgaagatggtgcgatcccggtcgaagtactacaggccggacacgaggctgaccaacctttgacccctcgcagctgaacgacctcatcgagctgaaccttcacatctacccaaagcggtcgccttacgcccgctcgggcttcccatctcgagcaacgaccgcaccctcctcgcccgtcatcaagaacgtctccttgccgtctgacggcgatgccgccacacctccaagtgcctcaagcagctcgcgcagcgtgaacgttactgtcccgggcgactccgaggggggcgaggaggtccgcatcttgcaggcctggcggaagcgcgagcaccggaagcgactcgcgcgctgcgtgtccaaggtcgcgtcgattggcttcattgtgctccttgccagtgagacccagcgtctggccagatgcaatcgacaaagcggctcgactgaccccgacctcttctctttgcgcgcagagctcttcccatcattcgagaatctgctcgccttcatgggctcggctccggccttcatggtctctatcatccttcccctagccgggaaaaaagtgggtggtaccggctctgcccaaagtcgtcgacgaggtcacttggcttaccctcggccttttccctgcacagatcttcctgctcgacaatgcggccgagggcgccgagaaggacgccgcccggcggcacatccactggagcctcgacggcctcggcgactggctcctgatcgtcattggcgtcgtcggcgccgggatgggcgtctggggtgtcatcgtccgctgagcgagaaggacgaggcaggtcagcgcccgccccccccccctcccaacccgttagatgggacagccccggatctggagctcggaatctgcaatgcacccctttgttgtacatagtcgtgcgtgctggtatcaagagaggtcgcttctgaatctgcgcccatgtcgttcgtcggaggcgtcgcgacccttccgtcggagccgatgtctcggcaggacagcctcggccaacctcggcgcccaccgcgcgcgacgtgcgagctccaattctcagcccaccgaccaactcgacccagcctaccgaccaggaggtgaccaccggctgacactctgctgatcctgaccatcaccctcttctcttgtttccaggtcgaggtgagcgagaggccggcctgctgcctgccgctgcgtcacgacctaacagcttcctttggacctccatccatcagcttcggcctcataaaccagccttcgaacttccacccgcaaccagccaagctctcgacatacttctcgggcagaacgagccatgtcgcccccgccaaagtacgcatcgacggtcgatgaagaggaggagtcggtcggtctcctcccgcccaaccagcacgcctacccaccctccgctgctgctgcctctagcagcttgaacgggacggcggcccgctcggttgtctacattctccgacccgagtggccagtcaccgaggttgtgccagcccagaatgccgtatcagcgctaggcaagagccgcgaggtgagctctcttccgtagctcgctgctgcaaccctttccttgggatgcctgctgacgaacgcctatgatgacacccctcgcgcgtgctttcaggagacggtccagctcgtgctcggggccttcccggatctccagcagattgacgagagccggctcgagtttttcgtcccttcggatccgacgggcccgcctagagatgacatctaccattacgcacgaatcgccggcccggcctgggcagccctcagcgcgaatgtcgtgcgcatcgagatcaaggacgcgcctggcgataaggagcgccgtgggttttcgagcgtcgctagggacgatcgtctgaccaaccgatgactgacgccaagccctcgctttccggtggacgaataggccgtcgccgtgacagcatacaggggtggcgtgtcgttggcgtgatcatcgcttgcatggtaggtttcatcatcttcgccatctacatctacgttacggacgggcccaagaaggctgctcaaggtgtcaaggtgcccggcgcggcagcatcgcagcgctaaccttcgcactgcgcgcaagcgattgtcttctgactgtcacacgtccgcctgtcctccgccctcccggccctgttcgcactgtagccctcgccttgcctcatctgcaatgaccactgcccagccgctgccttcgatgcacgcctgacgactgccccttacccggggatcgcctctcgacggcttccagtcggccagagacttgcaggcagagaacgatgtgaaaccgaagtcgaagcaggacgagcacggaggccagatcaggagtgggatacgtagaggaaggagagcgagcggccggtcggatggatagaggtcgcgcgtgcctggcgagagatacaacagcatctttgagagaagggggagtaggggatcgtgttcggcgcctgcgacgagaagtaggaggacggtcggggtgcgcgcctacaccctatagagatattcgcccgtgaactgcgaaagtacggagcgacgagaacgggccagcaacactggatgactgcctgaagggtggccgccgtgaaccgaaaagcgtctgaaaggagaatgaagacgattcgccctcatgcaccggtcgacgacgcgagccgtgtcgacgaaggcccgggcgaagtgcggttgctaataagcgggcgaagcacgggcagcagacggtgagcgattgcgttcgggaggagggcgcagctggggataggtaggagactgacccctttgctagggtgctgctgcgcggggcggccgactcacttggacatggccgacgcaagcgacatggtcgattccttgataggtgagcttgagagcgagggcgacgagccgtgcgagccgagaggagggggcgaggcgtgcgggatgctgtggcagccagtcggtcgggcagccgtgagaagcgggcaggcggtacgagcaggaggggtcagaacagtgctcgatcggtggcgagatggcagagcgtcctgctcgtcggccggtcgacgtacctgtcgggcttggggatggcggtgccgacggtcacgttcgactccgacgacttgccagccttggacatggcgtaatcacccgagtcaaagtacttgcgctcctgttcgttatgtccggctcaggccaagtggtcggcaacaggcgcaagggagagagagagagagagcgacgaaggaccgacctgcatgcgcgcgagcgggttcgacttcttggccggcagtttgccgtacagctggaagagcttcttctcctcctcggtcatcgactgagaggagtcgtcggcgacggcatggagatgcgatagaagcatgatgggcgataggcaagcggttgttggtgagacggagtgagcgtgcgacagggaaggtccggggtcgtcagcccacacggccgtcggctggagggaagggcaggacgcgagcgatgacgcacggcaatgtctgccttgttctgctcgagccatccgagcgagcagagatcaaggccgaaggcgatcaacaccagatgagggatgagggcgggacgaaaggtcgaggaggtcagcagatgggcgggacggtttggccctagccggcggcgacggcggcggcgggctaggccgccttgagccagcgaggggctgcagggcctccctcgttcgcctgcgcggatggccctcgctcgagcgacaaaggacgcacacgctgagctggaagcatgtcgggattgtgcgaggtgttgcggtggcgagcgaggtgatgaggggcgtgcgagatgaagggtcgaggggcgtcgaggctcgacgaggccgttggttcggtggctggcaccggcagcggcagtaaccctagtcagcggacggagtttgaatcgtctgcggggacgtcacttctgacaactcgcgagagcaagcggtacttgtagggagactggtcgctgcactcgggagagggtgctacagagcaacgcagagccaccttggatggccacgcgtcgagcaagacgctctgcggaacgaaggctcgcaagcccgacagcctccctcatccttcagtgtcccgaagtgaccgcctaaatgtcgaagaggggatctaataaaggtggtctcccgctcctcctccttgcctgttttgcgccagaaattagacgcggcagttttcgaggcgggtgatgagaatgtcctcggcaccggcgagcgtcagccggtccatgacgtcggccatgcccttgcgcttgacgaggacgctgacggccgcccagccatcggcctcaaccgacgagatggtcggcgcccgccggccgggcgtgacggcgagggctgctggcaggttcttacgctcgacgttgaacgtacagaggacgtgctgctgggcggcgaggacgccggcaaagcgcgacttgacgagcgagaggaccgaagcgagcgtctcggcggggagagtcgggtgtggtctggacgacgtgatgaggaccgcctgcgaagtcatgagcgtgtggatcgggtgcaggccggcagcgcgcatcgtgtcgcctgactctgagaaaaacaagcagggaaggcgtcagcggtgaagaatgacgctggcagcttgccaggtagcgcaggcgactaaccgacaaggtcgacaatgccgtctgcgacgccgagcgcgcacgccgcctcgaccgagcccccgacgtattcgacctcggtcggccggtcagctttggcccgctcgtcgacctccttgaacagcttgccggccatcacctcgaacgaggtcgcaatccgcttgccggcgagctcgtcgagcgtctggaagccagagttgaccggcacctggacctggagcgcgcacttgccaaactcaagcgggagaagctcggtgatgaggtggtcgagcgccgactcaacgataacgtcctggccggtgatgccgagcgagacggaaccgagcgcgacaaagcgcgggatgtcggaagctggaaggaagacgctgttagggaatgggatgcagtcgtcgccggcggagtcgggcgagacgggaaggtcgcgcacggaagggggagagcggagctcgtcagcagctgctgaggtcactgcacacgaggagggagagacacggacagagcgattgggtggttctgaacgatggcgacatcaagccggtgctgcctgttgaacgagatgtcggcgcctggaacgaaggaggggacacgttcatgagtcaggagcgacgcacggcggccgaatcgaggggagcgggacgcacccttcagaagctccatgcacttctcgtgcaggcggcctgatgtgaggggcggtgtcagctcgttagtcaaggcatcccagctcgacccggagctgactgacccttcttcgggatagcgaacaggacgcggccctcgagctcctcggagaaggcgtgcatggggctgccgagggcaaagcgcgagcgggccgacgagctcgcgggcgcgttttcggtgggcgtgagcgacatgcttgctggagggctaaggtagagctagagacgggagggagacgagggactggtcgttgttggaggaggttcggtacgcggggctgttggcgtcgagctctccctccgagcctccgtcgcactcaaggcccggggctgaaaaccgcagcagcagaagggattcgatcggctcgcgcagtcagccggcaccaatagaggtcagggagggctcgggccatctctcgcagcagcgccttaagccatggcagggctggcaggcaggcaatcgtgctgggtcgcagaaggctcggagagcgacaggcatggatggcaaaggaggcgagtcggtcggacagtcgtcggccgacactcctcgtcggcccctttcgcccgacgccctcctcggcagcctgggcggcgagctctgctgcttcccgccctgttctgcatccgtcaaggatcatcgcccgctacaagaccgccgccttcttctgctctcagcttcttgctctcttcctacagcctgcgaaccgctctctcttctacccttcggtcgcgcgatctcctcgacttgcttcacagccgcccctccctccgatctccgcccatccaccccgacctcaagctagcatgtccggcgcgacgcccaaggaggccattcggccgacgtacgagaccaacatgacgcagcacaagcctgagctctacaataagtgcgtgcgagaggcctccatccctctcttctctccccctgcgcctctgagctgaccatcgcgcgctctcgctcgccgctcgcccgtgcaggaacgcctcgttcgtctactctgacgccgcgaccgcacccgtccttggcctgctcgcgctcaagccgggcgagcgcgtgcttgacctcggctgtgggtcgggcgagctcacggtccggctcgtcgaggctgcgggcgacgagggctgcgtctgggggaccgactcaaacgaggagatggtgcgccctggcagcttcgtcctcccgtgaagagcatttgacgctgacgacttgtagctcctgactcgcagctacgcaaagctaagtcgctccacccgaagctcgccgacaagacgttccaggccgacgcccagtcgctcacgctcccggaaggggccgggctcgagcactcgttcgacaaggtcttcaccagtgcggccggccgccagtcgcgctcgctttctcgagccgtcagaatctgacacacctccccttctggctctggcgcaggcgccgtcctccactggtgcaagcgcgacccagccggcgtcctcgagggcgtcaagcgcgttctcaagcccggcggatccttcatcggcgaggccggcggcttccagaactgctcggcgatccgctcgcatctccaccaggtcctccgtgagcgggggcttgatccggagccgcgcgacccattctactacccgacggcaacggcctaccgacgcctgctcgaggaccacggcttcacggttgattcgtgcgagctcgtccctcggccgacgcccctaccgaccaacctcgtcggctggctcacgaccttctgccgcaagagcttcctcgccgacctcgacgacaccgcggccgaggaggtcatgcaggaagttagcaggcggtgcgagccagactgccgcgacgaggagggcaaggaccacgccatgtacgtccggctgcgcttcgttgcgcgcctgtgacgcatgcgcgggatagtccgacatacaacctcagatgaaccctcgcttcatgccctactgcccgagaccttgtgccccgagctgtccgacaggtcgtcgcttgcgagctcgcgctcaaagctgtccctgctgcgctcgctgcgctcgtcctcgccgagctcaaacacctcgccgccctcgacgaggtcatagccctgcccgtccttggccggcgtccgcgagaagagaccgccttcgagtgagctggccttgggtggccgcgagacgccgaaccaaggcgagacgtacgccgagatgacgacgatgacggcgaggtagatgacgaacgagagggcaaacatgcctgcgcggggtggagcgtcaggatcaaccaccgcaagtagaaagaaagaccagcaaaaggaacgcgcacccaggaggtacgtcgtcgggtcgacgttgtgcgcattgagcgccttgatctgctcgtcggtcgccgaggcaaagatgcatctggaagggaacggccggctagtcagcgaggctcactactagcaggaagaggactgaacacgaaccccgtcaggcagaggaggtaaggctgaagagacaatacaggccgagagatgcgtcagtcacgacagaggagacctagagccgagagacgcacgtagagatgctgccagctcttgacgttgtcctggtcgccgtagccctctttgaggacaaacgaaatctcgatgatccgcgcgaggcctgccgacgccatggcccaaccgagcaggaggtggatcaaggccgagccttcgacgtgctggtggtgcgcgccaaaggcgaagccggtcatgataaagctggacgtcgtcaatgctacaggatcagctttggcggtcgacggttcagttgctttacgaggattcgagactcacaccatcgccgggacccagttgcgcttgccgcccatgctcatgaaaacgcccagcgcgccgccggcccaccagagcacgccaagctgtcgaacagcagtcagcacatgccagcagtaagagttacagaagcgcaactcactgccgtatgctggaggtccttcatcgaccagccgtccgagtggcgaagggagaatgtctggccagcgggcgtcgcgcaggcaatcagcgagggcaagggcagggcaccttgtggcgtcggcggctcacgttaatgatgccgaaggtgaggatcatgagcgagtcctgttgcggtgacgggaagaacttaatcagcaggagcgtccgtgggaggggcaagtgaggagtcgcacatagagctcctggctctggcctttgcgacggagccattcctggccgcagtatgccatgatctgcgaatgagagagagagcatcgtcagcggcgacaacttaggcacatgacgggtagacagggccgcacggcgagactcgtgccgtagacgcaatacgagaagccaaacgtgtggtgcgcgaggcactggagctgctcctcgccgaggcagagcgtccaccacatctggacgccgagcaagatctggagcgcgccgacgagagggtagagccggccggtaaccttgtgcaggacgagcgggatcgtccgaaggcggtcgatgtgcagcttgaggtaggcgccggtcgatgcttgctgcgccagtgccgcgcacaaagccgaacagactcaaacgcgagtcagcagccggtgagggtgagaaaagcgtctggccgactcacgataacgagcatcgccagtagagcgagggccattggaccatctggtagggttgagcacggcgtcagcgctctttaacttatcgagggcagcctcgcgtcgtgaactctggcggacgcacgcgcctgtgggtcgtcgacggccagcctttggtcagcacgagctccttcctcagaggggcaaggctagtccttggggcactcacagctgctgcatactctcgctcgccgccatgatggtgacctgcgaagggcgtggtgagccagcgtcgattcgtcagctcgggctgctcttcgggcgacggatctcgcgaagctgcctcaaagagccgggcgacgtcgaccgccgggctgcttaacaagaccgcctcgcaaggcaggacacagcggacgcacccaagatgtagcccgcgccagtcatgcagagcccgacgacctggcaagggacgtgccagcggctcttcttcaggccgagcgccatgccgatcggaaagacgagcccccaagcgagcgcctgcaggccggcatggaggaagatgaggttgccacgcgggagagctgtgtcaatctggtccgccgtgtggtggtgctcgtgccggccaatgaggaagctcgcggacggcatgctgcttggcaaagggaggatggacgggcgagaggagagggcacgacgtcgtggcgcctgagtcggccggggcggcggccggcgaaagcaggggcgactgcgcatcaaccgctgctggtcatgagtagccagttccctgctcgttgatagcatgcgcaatgcctgcttgtcaaagggtgcaatgatcaccgcggaggatcgcgtccttcctcgacaaatcagggctggtgaaaggggagttcttggcatgctacaaccgcctcgaagggacgaaggcgaagacgaagagagagaaagagtcctggttattgctacagaatgccgtcgaatggcagaggagagaagagtgtccggtaagtaatgaaagaagagagaggagtgtctagtgcggtcgagcgcgagggttaggatcggtgcagacgagcgtctaggtggcgggcgcgccgcgggaaaacttgagaccgaggagaaggaagatgaagatgagtgtctgtggatttggaaggatgaggatgatgtcgaatgtgcaagcgtgttgcggaagggcaagcattaaattcgaagggcgcaaaactggcgtgcagggcaagaggaagaacgtcagccttgtcgagcctcgagacgagatggggccacgagcaagcacgcacttgatgcggacgtaatagcgagtgcgagatcaccaccgctcgtcaccctcccactgagcgtcactgaggctcgcaaggacgtcgctgccgatgcgggcgacaagcgtcagcgcgccgatgagcgcgaataggccaagcacacgcgtcacacggccgacgacaacgagcgcgcttagactctctcgccgctcgcggatggccgtcggcgagcacgggtggaacggccggtccttgtcgagcggaaagacgaagcgctctttcgagccctggtagaccggcaactggaagtctgctgccggccgaggcggcagaccgcaagccgagatcgaggcgagagggaacggtgagctcaagctccgccgtggccgctccgactgagggcccgacggtcggcgaggacccggcgtctggccggcggtcgggtctggtgcgaggccgccgtactctggcgtcagggtccgcgagtgcgccggccgccacatcgacttgagcaaggccgagtgcgtgctggtcgagccggagcgcgaatgccggcggggcgatgaccgaggcggtggcggcttaggcgaccagctgtcgtcgtcttccggaacgtcttccgggatgtacgggagcgaggctggcgaggccgtcgatggcgggaggagcgaggaggccttcatgggaggcgctcaagcaggctgcacggaagagggaggtagacgggcggtgcgaactgacccggagatgtgaagagtcgaccggaggaagggtggcaagggcagtcgattgatgctggtcgggtcaggtcgagacaggccaactgtgcgggtccgcaagcgagtgaggaggtcagcacgaggcagctgacttgccaagatgcccgctgtgacgaccaggcaaaccaggagaagttggataaatgacggaaggcacgtacgctcggatcgcagaagggagactggtaacgaggagcgagatgaaacgttcggtttgagtccgacgcgtcggcggaggagctagcgacggcggaggggcaggacggggatcgggagggccgagcagaggatctggacgaaggccagcaagtaaacgttggagaggcagaagggacgagatacgtcagcgactggagatgaggagcagcggccgaagaggaggctttgaggtcgccgagctggccgggcggccggcgcctgtcgaagggacaagcactggtaccggcagcagcaacatcggcctgcacgaggagagctcacgcgtcgatgggatgcgggtcggtcgaggctgagctgtctgcgaggagggcgaggttgtaacgggtgcgaggaaggagagcgagagcgaacctatacttgctcggaggaggttgggcgtatgtcgataggcggcgcccctcgtgctcgctctcttgggccacacttgcagaaggtcgatcccagctcagcaggcagatgcagaaagggcaaggttcgggggtgggggttcaggccgcgggcgtcaaaggacgctgctcctcctccttccgctctcggtcgagctttggagacggttccgacctcactttgcgatcgagcaagacagagcgttgaaacacgtggccgggcgccgtcatgcccagcaccggtccggcagcacgctctctcctccctcggtcgaccctgctacctgcgttccgcctaccgtctgcagctctgcgcgctcctcccgagcagctcgagggcgcgctgacctccgtcgaccggtcaaccgccgggcgacgtctcgctcccaccagcggctcccggcgccaatcggctcgcaggcggccggagagctcgaggcccatcgtatcgacgtcgctgactgcgagacgacggcctgggggacaggcgaacgacgatcagtcaagaaggtcgccatcgcccgaggcgtccgtcgagagtgagaaggccacagcggcggagagtctgcaaggagagaggttcagtcgtcggtcgtacggcttggccaagcgggtaggacgcaccctctgcgggtttgacgactcgcccgaggccatccatcagtgtaaagttccggccttcgctccgtagcctacgagctagtttccttacctcaccaaggtcaaactcgttccaaagagtcgagtcgggttaggcaggacgacggcgagcggcttgatgagaacaatgacggagatcaagaaggcctcgaaagagtcgtcgatataacccaagtcagcttctacaccgcagggttgagccacaagcaaggaagccagatgtagggcggaccacgagtcgcttaagctcgattcgggcgagaaattcaagcccaggtgggtgagggccgggcagaggagcggcaggtcgatattttcgtaggaggcgtcggtatgcgcgtctgtaaacagatggagaatttgcagctggccgccgacggttcgggggatggtcgagataagggggaggtcgctcagtccgagattctcgaagcggaggtcgaccaggtccgggagtcccgtccagataaggtacttgggccaagggtagtcgccgtaagcgtcgaatttgagcttggtgaggctgctgaggtcgaaacgactttcaagccttgccgctggagttggatgttcgtccgtagggggcccgagtgtgggcccatgaagaatgagagccagtgcggtcggtcgggcgacgaccggagcagcgtgagcggcaccgaagttgctaggccaagaagcggaggccaaagcaagacggggcagacggtggataacgtcgaggagctgtaaacagagagaccggttgacgcgttcatccgaggagaaatgaagatgtctgaccgactgagctcgctcagtccctccttcgtcgagagcgacttgaaagtatgcgaccgtctccagatcgaaagtgaagacaacgctccggtagaggagcggcaagacaatagactacaggtcggagagatactgggtcaagccagacgcggcagacgagcaagaggccgtgcaggcgccgctgttcttcgagcagcgtccagcgttcgccgaccgctggccggtctggaacgggctcgagcgacgcgaggacgagctcgcgttggatctcttcgggcatctgggcgagcgagatgaggcgaggtctgcgagtgcggccagcgggtcgtcgacgagctgaagtcagccctccggctctgcgcacgacgaggggcaggcacaagccccagcagagcacacacggcatgatgaacgagagctgaggagtgcaagggagggctacaggtagagtgagccgagggaagggcgggcaaggtggtggtcagaggggtgctgtcgctcgagcgttcggaacgttgcctgctgcgcgcgcggcgactcgagacgggcctccaacctggcccggccggtcgctgcaaggagacactccctctgacacgcatattgaacgtctatcgataaaacacgagggatttgaggagagtgccggctcctcccgagtgcccgccttgagtctcggtgcccttgggagggggacgcggcttcgtgcagctggtcgccctaccgacgtcgacagccatcgcccgtcgggcgtgtcaatgagccatctatgccgaaccgaatccctgcttccccatttacatcttccagaccttgtcgtcctcgagcgcgcggatggcgtcggaccgggcgtcgagcaggccgttggccgtccggggcgaagccagcagggtgtcccaccagccaaagagaaagtcgcgcgcgatcagcttgaaccagggcgtgaaggtgagctctacgggcaaggcgagaagagaggagaaggcgtcagttggggagactcgcggcccgtcgaccggaggggggtccgaggacgcacccgggtcctcaaacatcttctgcagctcctccttcgtgacgtagcaagagtccatgacctcgttcgggttgtcgtcgtgctcggtgtcgagcgtcgtgaagaggatgtagtcgactgaagaggttgagagaagaggacgtcgtcagccttcccggcacgtctgcgcacgcgcgcgcgctgagcacgccggaacccaccctcgtgctcgccccagaggccgtccgacggtgcgaggtagtggatacgcgtcaggtaggagaagatctcgggcggcgtctttgacgttgggatgccgagctcatgctcgagcttgcgagacgccgcacgacggacgcctggaggcgagcagagcgcaggacgtcagcttccggcctgaaggcacccagataccaacagtcagctggccgcacccatctggcccgggatctcggtctcgcccttgatgctgagtgggtgcgagcagcacgtgttggtccacatgcccgggaaggtaatcttctcaatcgcccggcgctggagcaggagcttgccggttgacgggtggaagaggaagaccgagaaagcccggtggaggaggttgcgcgggggaaggatgttggtcatgaggtggcctgttgcgtgcgaaggccgttggcgagaggaaaggcggcggagggtcgcgcaggtcacacgggtacaggcagtgcagggcacgagcatcaggaagaaggcatgcgaccgagtcagcacttgtaaacctttgcgtggccagagaaagagccctcggctagtagccgtccggagcggctccaggacacaacccggcgacgagccgggcggcggccctcgccaggtgtgccaggcacgcgccgcgaggttccgaaggaagaggcagaggaggcgacgtacactccttcttggacgcgtcgccgtaggcctcgtcgtttgggtggacgagaatgcagcgctcctccatcagccgggctctgagaagcgaacaagcgacaagcccgaggtgcagcagaggtcagcgctgcagctggcaggagctcgtacgacctcagcgtgtcgtcgagccgacgcaacgctgctcccctcggcgaacacgtcgtccgctttcttcgagcgacagcccgaggcgacccgaacttgacaagaagccgaggacaggggtggccaaatttgagggactcactgctcctcgtcgtactcctcgaggctctgctcagcgttctcctggccctgctgctcaagcagctgctccttgacctcggcgggcggtgcgacgttgggcatcgacatggcgggcgggctcttccaagtctgtctggtctcgatctgacggggtagtgaagaacgaaagggtgcgagggcgagctgaggcggaggcaaggtcggaaggcaggaggcaacaaggggagctcgagccgcgtctctgcgcgcgtcggtcgtcggagggaaaaggccagccgactcgacatgcgtacgtcgctgcactccgtccgtcagccggtcgcatgtctgacttgactgctaaaggagattgtctgaatggagagacctgcacaacgctgctggtctttcagctggcccgtgagcgtcggctaaactcgcctgctcaaggcacggaagtcgacacgaagaggaccatagatccggcagaggcggtcctcttccctgagctcttgagcggtgctgcgacgagcgagcgccgttcaaggtgtcgtccttgttcggctttgaaagccggacccccttcgggcggcagcgctggtgttgagcgccttgggtgtcaacgggcgtctcggtcgatcgctcggcggaggcgaccaggcctgacttgaccggcagcagccatcacaaggccctcctggaaggctcgccacaacggcgagtacttgccgggtccggcgacgtgtctgtgaccggtcgaatgcctgacggcgccgcccccagagagacgcccgggtcagacgccgggccgccgcggtagcattgttcgaggaccagcgcactttcggctggtccgaactggcggctgatcagccgacagcggcctccatgaggacccattcactttttcggtccttcgcccagagctcgtcgcgaaggacaacctcctcgcccccacggccttctcggccgccgccgccgccgccgccggcacccgcctcgtcgtcgtcgtcgcctgcctctcgcaagccgcccgtcacccagcggacgcgctcgaggctcgggagatgtcggccaaaggtctcggccgtcggctggaactgctcgggtgtgagcagcgaccggagtcggacgaccgaggcgaggaaggtcggcgtgcagtgcccgcggaggagcgaagggaagcggatcgtccgggtgaaggtcgagtgcgagtcggacgtctggagcgaccgaaggttggtgagcggggcgagtgcgcgggcaaagatttcctgtgaggccggcaagaggcgccatggtgagcagggcgggcagaggtggtcgtcggagtctgtacgcacgatgtcggcaccccagaggaggccatcgcggaggccccagtagacgccgtcgccctcgtcgatgtcaccgtcctcgccctcgacgccgacccagccgccggcgcagacctcgatgccaagactgcggaagcctcggacgtcggctagagcggccgcgagcgctgcaagaaagccgacctcgagcttgccgacagtcagggagaggtcttcgagcgtcgacaggtgtttgagcgaggcgacggccgtgctgaccggatggggcggatggtggtgcttgcacttgggcgtcggattggggaaggcagtgaaggcccgcgtgagggccgaggcgggcgagatggagagaaggcgaaggtcgagcttgcgcagtgcgcggaagctcggcgccgagactgggttgagatagtacggcaggagcgagtagtcggtcctctgccggtggttcctaccgatggcagcggccgcggcggcattctggccggcctgggcgagctcatcggcgtcggcgccgtcgaccagggacccttcgtagccagcctcgtccgacgctgcctccgaaggcgcatagtacgggctcggggcgtccgtcaggttgtagctgagcgtcaggttctcgagcagcggcacgtgcggcaagagatgaagaaaccaatcgtcggcgacgaccggcacgaaattgggatcgagtgggcccttggggttctcgggtggcgagagggcgagcgagagggccgagtgggtgatgtgcggcgtgctcgccaacgagagggtggacaggagcgggaaggtcggcacggcgacgtctggctgcggttgaaggatctgtaaagcgggatatgcactgagcgtcagcacagcactggttttgctatagttcgaggggttgggacgcacgtagcggagcggcaggcacgcctcgctctggtcgtagacggtcactttccggaccgtcttgcggttggcccagacccagttgcggagcgtctccttgctccgataccagacgctgcgtgggacggcaacctcgctatcagccgaggaccagtgggcgagttgactttcatcggcggcctcgtcctcgtcgccgaggtcaagctcctcgtccgactcggaaaggaagcggtctgggttgacgtcgatctccttgaggccggtgacgagaccaagctcgcgcgggaggcgccagtcggtgaacatgaagaactcgaggtcctcgagtttggggagcgaggccagggccgagcagagcgagggcggcggcgaggcgccatagaggacgaggcccttcaggttggggagcagcggcaaaaaggccgatagccggtcggtgaacggcgtcggcgtcggcgggagggacgataggtgcttgatgtagactggagggaaggaggcaggtaagacctctgacccgaggatggctagggtggggacgggacgtacgaaactcgatgtgctccctcaaccgcgggttggcctcaaggccgagcatgacctcctcccacggtacgccgtcgtagacctcgcgctcttcgtcgtcgtcttcgtcgtcggtctcgccttcctcctcgtcgacgcaaagatggacgcccgtaaagaagaagccgcggacctcggcgcagatggccttgctggtacggctgagggccgcgagctctggcgtcgtgtcctcgtcgtagccgacgacgtacgggctcggcctcccatgcggcggcgggagggccgggaggaagggcgagtgcctacggaggaggtgcgggtagatgtgggacggcccaaagagcttgagcacgagcggaagcgtcagaccctgctgctgcctgctctcagcaacgacggcggcggcggcggcggcgggcctgcccggcgacggccggggagggcggacagaggcggacaccgttggacgcagagccctcgtgcgcggacggccagggctgggctagatgcgcaaggggagccagagccggagcccgaaggaggatagcgccggagagtgcgagagcgagggcgagaggctggcgagaggagaggctggtcgaggtcggaagggcaaaagttcagagacgagacgagccgcccgtgcgcggtgagacgaccgtcgaggtcgggctcgccaggaggagggtcgctcttgccggccgaccgccagcatctcgcaccccttctttcgcagctagacagccagcatgaccgatctcagcccacaggagacggcgaggaagctgatggagcgcaaggccgacatcgaggccgagattgtgcgttgaccgctcgctggcgcgtgcctgcgcactcggcctggcccacacggctaaccatctcgcctgctggtgctcgctcttctcatgcaggagggccaccgcggccgactcgaggcggtgcggacgttctctctcactgtgctgatcaggcaacgggatgctaactttccgtaccttgcgctaccaccaccgccgcccgcaggagggcagcacgatgcactcaccgctcgtcaccctcgacggcttcccgcgcaatgacattgacgtcctcgccgtccggaccgcccgggtccgcatcctcgagctcaggaacgactgtgcgtcgcgccgatgcagtttgcatttcattgctgctcgctgacccgagccgacgcccggccgcggcccgcgcagtggaacgcgtgatggaccagatctcgcttgcccttcagcaggccatcccggcctctgcacagccccagacgccggcagcaggcggctcctcgacgaacaacggggtcaatggcgctgcccgggaaccgtttgcgctcgtcaaggcggtcgacccggccggccctggcgcagctgccgtgcgtaccggcctctcgctctcccgctgccctcgacctccacgctgacctgcttcgactcgcagggcatccgggcggacgaccagctccttatctttggtaccgtcacggccgagaaccacaacggccttaaggcgctggccggccaggtccgccagggcgagcgtgtcgagctcgatctgctgcgcggcggaccgtcgggccagaggcttagggtcggcctcgttccgagggagggctggggtgggaggggactcatcgggtgcgccttcttcttgcgtcgtgctctcgctggtctgtccttgcccggagggaggcacaggactgaccgtggtgcctttcgttttctccgcaggatgcacatcgtccccatctagtcatgacttctctcgaactttacgtgcagtttctgtcgctctcgttgtcttgaacgaggcccgctatcgtctcctgcgcccggcgagatggatggcccgagtgctcggcccttcgctcggtcgctcactcttgcccctttgatcctcgcgtcagccaccgccgctgcgggcccctctcgctcccctctgtgacgcccttcctcttctgctcggctgacctcaaccaagtttcctgccttgatcgacctctctctctcagctccctgcccgctcaatgcaccaccgccgcagctcgtacggcatcagggaccgcatcgaggcctttgaggctcggtcgcgcctcctctcgcccgcctcgccgacgacttcgcaggcgagctcgagctcgagctcgagctcggcctccctctgccctcagtctccaccgaccccttcccgcacgtcgagacgtccggtcgacggccagagctcgacgcggctggtggggtcggccaatggtgccgggcaagatggcagcacaccgacgaggtcaggggccgccgctcgaacccgacaggacgcttcgcccagctcgatcggctcgcttcgccaagctagcccagcgtcgtccaactcgactccatcgctggtgccgggcaaggccgtgatacgtggtctcctggtacccgagcaggaaggctcgccgatcgacggcctgccgctcgggcaggggcaagcatatccccacccgctcctcaagtcggctatgctctcgaactcgcacccaatcgcgcagtcgccgccggaccgagatcggctcgactctaacgacagcgacgaggagacggctctactgccgacgctcgactacgagccatcgtcgctgtcgagctcgtcatccgcccgagcgagcacggttgtcgccgaatcgacttctcctgagaaggtctttgagccgagcaagaccagcgccgccgccgcatgcttacccaaccggcccgacgtcgactgcgctcacagccctgtcccggtctcggagctgttcaggcccggcgccctcccgctcgtcatcgcccacctcgacgactacctcgacgcactcccgccagtcgtcttcacaccggtgcccctcggtggcggccagccctcccggtctcggtcgaagccgtcaaaggccgagcgcgaggccgaagagcggcgccaggagggcatgtttcccccgctggagcagctcgagggcgggtcgggcgtccacaagtatctctggaaccgggtcggccggaggcgtgtgcgcttcgcctgggcacgaccgagcgttctggcagatacgatcgccagtctcgcggtcggcatcgaggtgcgtggtctggccaggaacggcttggtgaccacggctgacctcgcttctgatgctcggctcgcagggttccgccggcgtctcttcgctctacaatctcgagaatgcgtacgcggcggtccaggttgttgcgctcatcctgacgtcggtcggtgaggacctctcagtgctgccgcccagaacagggactctgtcgctgatctactgctggcgcgcgcttccgcagcgaccttaggccagtcggacaaggtcctctcgggctggcgcaagctgctactcggcgacatgtgagtgacgcagcgcccggtcagggacacatgccatactgatccggtctgcctcctcctgctgaaggcccaacattgtcgccctcaacttcccctcggtctttggccagtcgatcatccttctactcgtctaccaggcgctcgcgctgctcctactctgggcctttcgtgcgtccgattctgcgctcgcgtcctgattcagccacatagctaacgagcgtgctcgctcgctcgggcaacagaccgcgaggtcaaggctgccggcagtccatgcgatgtctacgagggcttcaccgcgatgcgctggaccggctggggtcgtgcccgtcgtgccaggtgcgtcaagcgggaacggcggcctctcgaccgcctcggctgactgtcttctttcgcgcatcagggtcctgctttgcgcctttggcctgatcatcttgtacctcccaatgtcgacgatggcggtccgggcgctcgtctggtcgtcagtcgtttgctagctgtcgttcgctacgttcctaccgctgaccagtgacgacctcgccttgcagctccgatttttggccggtcgacgtgaatccttacttgacgacggacgagcctgacctgccgccagacctcgtcttctgctagtacgtgttgttctgcgcagtactcgccctcgctctggactcatctgaagtgagccttcgtctgcagcacgacgacgaccactggcggcgtcaattgggcgccagtcgtcgtcattgcgtcggccgtctcgttctgcgccatcaccgtctacttcccgctacggctcttctggacgatcaaggccaaccttccgcacatcgaccggtacaccgagctcggccgccgccgaggcgcccaggaggcggaccgcgagtaccggcggctactcgagcgggacgacaacccgctcgccttcctctacaagggtgcgtttcatctccttaccccgaccgactgatcttggctgacgcaagccatctgcgcaggctaccgaaggcgctggggcgcttttagggcctactacctcgtcatgaagctgagcgtcctcgtcgtcgtcgcttgcgtaagcaaagacaactgcgtctttagccggacgaccgtctcgcgggcgatgctcgaggtcgtccagcagggcgtcatgctgttctttctctcgatctggctcgccatccagatcgccttgagaccgttcaacgactcgaacggcaacgcaagcgagatcctcagtcgagggtccgttttgccgctcgtctgcgggttgtcgacagctgacttccccaaccttgcacgctccgcaggacgtacatcgccatgaccctcgtcggactcttagtggcgctcaacgtctcgggcaaggccatcctcgacagctacgtgctctacgcgtgcgactctcgtccttgactgcctgcttcaggcgggcgtgctgaccgctcggtcgcaacaggctcatggtcatctcgtacgccggtaacatctggttcggcgtgatttcgttcgactttgcccagcgcaccatccagcgtgcgtctttcagcccttttcaggtaacgccatctgacggcacctccgtcctcctccttcaggcttccagaagcggctcgactggagcatcgacctcttttcaccccacgtcgacgtcgagccctggcactcggtccatgtcaagcggcgcgtctggcaggagacgctgtcgacgatcctcctgacggatccgagtctgcggatgtcatcggccaaggacgtcgtttactcggaagcccgcagcggccactggccgccctacatgatcgacttccagaactcggtcggcgaacggcatgctgagaacctgaaggtgcgttcgccagccgatccttacgatgcgctgttttgacgacctcctttacgagtcagatcctgcgcgagatcggctcagacgcatactatcacgccctcgatcgcagcaagcagaagcgctgggacgccttgcgcggcgcgacgattccggtcgggcccgactgcttctaccggccgtcccgtggaccctttccggcgggcgtgacgacctggttcggtgacgcttggctcgtgccttttcctctgacactcgtgcgtcccttcagccattcagtctggatcctcgctcgcagctgaagtcctacccgcaccctggcagatcatccgatacgaccaatggtcgacgccgacggtcctcaaggagattggcgagatcggtgagtggcccttcgtctcgtgctcgtcacgaactgcgctgatgaagacgctgcccaccccgcagagtcctacatcgagcagaacgcgcgaagctcaattgacgagcgacggatgctacgtgccgtcctgcggtcgctcgaaggccagacggtccgctggccttactcgacggtgcgacccgccaagaagggacttcttgcggcagtgaacgcccgtcgtccagctcccgacatcgtcacctacccaagcggcgtcctcgaggtccggcgccaggggtcgctcccatggaagggcctggagcttggcagcggcttcgatgtccggatcaaatacggcaaggatgtctttgccggcgcggctcaccttggcctgacggacgactttgccctcagcgatcgcctcgccgccttcctcgagcgcaacgccgacctcatcgatgacggtctgccggccatcctcgccatccttgatgactaccagtcgacgctcacgtacgaggcgcgccgcaaggtcgagacgatgtcgtacggctttctccgcgacgtcttcgacaagctgccgatgacggtcaaggagatggagtaccgcctccgcgagggcgaggccaacgaccggcttcagacgctcgtcgccgaccacccggacgcctttcgtgccgtccaggagcggctgcacgctatcttccgctcgcgcgcgacgtgtctctggtacctcttctgggtgggtgccttcggcagtcccagcactttcaaagttgacacgccgaccgctatcttactcaggacgacctctggcggcggaaccacgcgacgattgcgctcctgcgtacgcaccggacctccttctcgcccgccttcccaacctcgatcgcttacagaccgtgttcgcggtctaagctcgtcgccttccttggcgagcaccagctctggcctgcgaagggcaagcgcggcttctttgacgacagcgtcctcaacctccttttctttacggtcaacgagcaccagtttgacgtgcgtcttcgcaaccctttagcatggctcatgccttcctgacgtattgcccaacctcttgcaggacgtccccgttcactttggctcctcgccgacctgccacgtcctctcgtcgctcgagcatgccgccgcgccctcagccttctcgaccggcggagcgacgttcgcctctgcgcccggcacagactactcggcctcgctgctcctcactcggcccgcgttcgagtgggagggcgcctttctccccgcgcagtcggggctcgggcagcggttcaaggaccggctggcgcgcatgctcgggttaggccgttacgaagggccaaggccgaagcgggcccaactcgcgctcgacgtcgagcttcaggagggtgaaaggggtcgttatgttccgctcgacggtcgggacgagtcgtgagcgctgaggcggccggttgacccgacttgcacggatgcaatggttgtcgtctgcctgcggatgctctaaggctacatgatctgggcccatccttgcgggcaaggatgcgagggcactctgcgcttcgggtctgtccatcgtcttcactctccgatgcaagtggcgacgaccgtgcgctcctgcttgtcgttgcgaaactcggtcaggtagatgccttgccaggtgccgaggttcagcttgccgttggtgaccgggatcgacgtcgtcgtcccgatgagggcactcagtgtgtgtgaacaagagtcatcaggcccctcgtccgtgtgctcccagtcgagcgactcggggacgatcgtgtcgagggccatcatcatgtcggtccgaacggcggggtcgtaattctcattcagcgtgagagcagcactggtgtgcttgatgctgaggaagaacatgccgaactagcaggcaagagagcgatcgtcagcagcaggatcaagggagaggaggagcaggaggtgctgcgagctactgagagagcggtcgtcggtcgcagcagcgaggggaggaggaggcggaggagcgagctaccttgacctcagcgagctccttttgcacctgggcgagcacgtcgcgcgtgacgaggtggcagcctttgctgtggcgcgggagcttgaactgcttctggaagcccatcgtagcgagaaggagtgggagcgagagcaagtcgtggtcgaggaggaggcggccaacaggccggcaagagggcaagagcgcgtcactgcgggcgggcgggagtgtgggaacccccaagttgacttctggcagccgtgcgactccttcttttttaattctggccgacccgctccgcttcagtcggcgctcgcttgcgcaagcctccaccttcgccgccagtcagtcgtgtggcgaacttcctcagcatacaacgacgaccgtcttccctacgcccgacccccaatacttcctcggccgcaacccgcacccgcagctttcgctcgctcccactccgccgccgctgacgccgccgccgccatggcgtcgttcctcgcgtccccgatgtcgaccaacgcgacgctgctcgagcagctcatttcgccctcggcgccgaccgctcccttctacctcgtttcggaccggtcctcgctcgtcccgggcctgtcggaccgttatctgtcggtcggcatccccgtcgtcatctactggctgctcggcgggctcttcttttggctcgacaagatggcattcccgtactttgaggctcggcggatccacgagagcccggaggtcgagcgccgcaacagggtgacgatgcctcaggtacgcctcctcctgcttccttctcgttgctctgaggcggtcggtcgggacatctgaggttgaggttcgcctgcgaaccgagcagccctggctcaactcagggctgctcggcgcatgagctccgaccgtgttgtgggccgtctgcggagcgcttctgcgccctccgtcctcttgcgctcgtgctgactcctcgccgccctccccttcacagctcctgcgggccgtcctgctccagcacacgatgcagacaatcctcggcctgctctggctcgcgcccgagagcgaaatccaaaagacgcaggtgtttgtcgaccacgccgcacgcatggccgagacgtacgtgccttgggtcatcagcctgacgtcggtcgcgattggcccgaggaacgccgtccacctgctgtcgtcggacggaggtgcggtcggccggcggatcgttgagttctcttactggtggggctacccgatcctccagttcgccgccgccttgtgagtcgcagctggttgtctcgtccggctcgtggcggccggctgaccgtccctgtaccctgccttcccagcttcatcatcgacacccaccagttcttcctgcacaaggcaatgcacgaagtcccctggctctaccgcaacttccactcgcaccaccaccggctctacgtgccctatgcgtttggcgcgctctacaaccattggctcgagggcctcgtgctcgactcgctcggcgcggcgctcgccgagatggcgacgggcatgacggtccggcagacggtcctgctctttggctttgcgagcgcaaagacggtcgatgaccactctggctaccgcctctggtgggacccgctccaggtgcgctgtatcccgcagacgtggtcgtctccctgcatccggctgactcgccgccttcgttctgcctgcgccagatgctcttcgcaaacaatgccgactatcacgatatacaccaccagtcattcggcatcaagagcaacttttcgtgcgtctgtcggctcgctgcgcttcgcaggcgtcagcccagccgctgacgccattctcccttccttctcccaggcaacccttcttcacaaggtgggactgggtgttcaacacgatcatgacgcgcgagcaggttgccaaccgtcggcggccggccggtctgacggccgagggcgaaattgacgccgtccagaaggaatacaagctcgagtgagccttcctctgtcgtcgtcctctgcctctcatcgcctctctctcgccctctgttgtacctctgccttggcctgcttgcacttctccctctgctttctgtcgctcccctcgctccgccatacccttccgacccttgcgtcgtcgcactgcaccctccctaatctggccccggttcaagcctacattctgcccagcgccctcagtggcgcatccttttgcatgtcctgcctgtcttcgctttcgacgacctcctgagttcgacgcgagcgtctgtcggaccagctcactcgaccgccctcgaccgaccgacgcgcagcagcctctcgagctcgagccgtcgtttcgtctccggtcgacccctctcgcccgctaccctcatccggcctcacctccggggaggccttagctagcaattggcccgggtgccgccatgccgtgcgtcccccgagccgccgccgccgccgcttcgctcgcccgcggcgagttgacctgctgagccgcgcgctcgtccccctctcgctttcgcacgcaggcccagccggccacgcctcagctcgctcgcccacgtccagcgcgagatcatcctcgcgtcgttcgagccgctcttcgaccggccggccgtcgacgaccaccgctttacgttgctcgagaaccagcggcggctgcacggcctcttgctcgtctgccgcgtttggctcgttgcgtccctttcatctcgagccgtccgtcaccatcgatggacaagcacagcttacgctactttctgctcctctcggcagtcgatcgtgctcccactgctctactggtatgccgtcctcgggcccttgccgaccgacctcgctctctttcgccggttagccgccgtgtcccgacctgacctgctggacggcgtcgagcgcttctgcaccgatccgactgtgtcagacggcgccattcggcacttgagggccaacttgcgcgacacgctcgagcttctggatctcatttgccggcctccgctctgtatcgattgactggctgcctacgtcggaccctcgagccgtaaagatcaagaaccgatgccaaacctcggtactccagcagactctagtcggtctagagtcgttcggcgatggcgacatcgtaccgctctcgttgagcaggtatcttgatctctcggccatcacgcgtcccgacatctctgcgcccggcgatgcgccgtggccggtctatcttgcgcccttgtcctttccggctttgatcgacctccgctgtattggcttggaaggcgacggcatcgactgcgtccagacgatactccaatcactaggcctcaaccttcgccggctacacctctttagcggcgacctagcagacggtttcggccagctcgacctgccgactttctgcccgttcctcaccgagctcggctggaacgagacgacgtgcggggcagtcaccattcgggatggctggcccgacggccggcggctcgactcgctcctcctctccccacctgcccccaggtcgttcggctcgacaggcaaggctcccgctcgtgtcatcatgtccaagtggctcgatatctggctcgatgagaaggaatcagcctccttctggtttagccagacgattgttctccggcctcaagtcgcctgttttgggcagccccagctggattcttctctctggtccgactacagccccaaacgcgcacgagagttcgctcgccgcgtcgccgcagacggccgtgacatcaagatcgaggacggtcttggccggaccatcgagccgctcgactacccgtgtgtgtttccctccagactggactgagactgcgagacaagtgttaacgacaaaggccgacttgtgctcgtcgcagtctatggctcgtcggcggtctcatcgccctccctctccgcctcagctgaagccggcaaccccacggcctcgcagtcgtaacggtgcgccctgcttctcttctcgctttcctccgtccgccggctatatgaggccatcattgacgatcttgtcgttgcgtcggtcagcagagttagccctcgctcatcgcgcagtcccgctatcgccgccttcggccaccctcgcgtcgcgcccacagcccatcacgttgccgtgcccttcacgttgccgccgacacgccctgctctcgaatgtccctcgccgtccctctcgctggcgctcttctgtgcgcccggctcagatgatccgactgagggcggcgaaaaacgtgtgcgcgcgaccgcgacgacttgattgcggcccgtcgctgagcgaaccgcgcttgtggtcggccggtcagtcctcgctttgttggcaagcggtcagcacgacgctgttcactcgtctactgcactgcgagccggtcgggatgacggtcgagcgtcgcaggcgggatgcggtcctggagaaggaagcttggcgagcgcgcggggctgggccgacggcgtcagcatggcggacgacggcatcggtcggccaggcgcggacgaggccgtcgctcggtgctttcgagtcagccgacccgccagccagccagccaggagaggcgtctggcccgtcggtccctgccgggcagcacggcgtccggtcgaagcaccgtgaacaacagcgactgggaaagctcttataaactgaagcgagggcgaggcgagcgagcgtggccccgacctctgcctgccctctcttctctcttttccgccgccgccgccagccaaacgaccagcagcacgccagaacgagtcaagctccgctccgagagatttcagccccccccttccgcccgtctgctccctcctgctcaccacccacccatgtccctcgcccgcaccctcggtcgatccctcccgtccctcgtcgcacgccgcacgcttctcaccaccactaccaccacccgcctcgccgcctcgtcgatcagccgccgcgccatgtcgtcctccgagtctatcgccgtcccgaccgacttcaacaaggtcctctacacctcgctcgccgagcaggaccccgaggtcgccgagctcatcgagaaggagacctggcgtcagttctccggcctcgagtcagtcctcacactttcctgctcgagctcggcaggctggccgaccgctcctggcgcggctgccgagccgaagccgcccgaccctctgtcagacggtagctgacccctcctttccttgaaaaaccctcgccgcttgacaggctcatcgcctcggagaacctgacgtcgctcgccgtcatggaagccaacggctcgatcctcaccaacaagtactcggagggccttccgtgagctccctctctcctcgcgtttgccgctcccaaaaagagatcgatcggcgctgatcgcccgatccccttctctcgacccttcccttcttccagcggcgcccgatactacggcggcaatgagcacattgacgtcctcgaaaacctctgccgcaagcgggccctcgaggcctttgacctcgacccgaaggtctggggcgtcaacgtccagccctactctggctcggtccgtcctccccttctgctcgccagcttccgactcgtccagagctcgatctgaccgcctgccctctctacctcttttcctcgtctgcctctccagactgccaagttcgtctgattttgctttggaccccgcttcggatcggccagctgaccgcctcctccttctgccagctttgccgcttttacagcgctcctcgagccccaggaccggctgatgggcctcggcctgcccgacggcggccacctcacccacggctactacacggccaagaagaagatgacgtcgtcgtcaatctacttccagtcgctcccgtaccaggtcgtccccgagacgggcctgatcgactacgacggcctcgccaagaacgccaacctgttcaagccgcggatggtcgtctgcggcgcgtcggcttacccgcgcgactgggactacaagacgcttcgggcgattgccgacaagaacggctcgtacctcctctcggacatggcccacatttccggcctcgtcgccggcaaggtccagaactcgccgttcgagtactgcgacgtcgtcacgacgacgacgcacaagacgctccgcggcccgcgcgccggcctcatcttcttccgcaaggacaagaaggacgacgacctcgagtccaagatcaacgcttcggtcttcccggcctgccagggcggcccgcacaacaacaccattgccgcgatcgccgtcgcgctcaagcaggttgcctcgccggccttcaaggagtacgccgccgccgtcattgacaacgcccgggcgctctccgccgcgctcctcaaggagggcccgaactacaagctccagaccggcggctccgacaaccacctcgtcctctgggacctccggccgctcggcctgaccggctcgaagatctccaacatctgcgacctcgtccacattaccgtcaacaagaacgcggtcgcgggcgacacgtcggctcaggtgcccggcggcgtccgggtcggcctctcggccctcacctcgcgctcgatgggcgtcaaggacatggagacggtcgccgccttccttcaccgggccgtccagattgcgctcgtccttcagaaggaggccgggtccaagctcctcaaggactttgtcgccaaggcgacgaccggcgatggcgagggccgcaagcagattgcccagctcaagcaggacgtcctcgacttctcggtcaagtggcccctgcccggcgtccccgacacgacgaccatcaagcgtttcgacgacgagcactaggcgcggcgtctctcttctctttctctcttcccatcatagaatcccctcccccgccaccctctctgcttctctctcctctgcttgttcaacagccaaccgccgccgtcgccttgaaaacccaaaagcctcccgtcgtcttgtgccttctcaccaaggtagtcgacggtcccctcccctcagtcttgtacacccgctcccagcgggcttccatacgcatgcaatcttttctcggacgagcggccgccgcaagcgagctggcagattggccgtgagcgattgaacggttggagttgtctgtgcgtcgcgcgatggcgggcatcttggccgaacgaggcgagttgatgggctcgaagctggcagaatctgcaggatgacggacggcgacggggctgccttctctccggcgtgacagacggtttgcagggtcgactgcgcggagagccaagcaaggccgtgcagcagcgcgcgcgcgcgagtgtcgtccctccctccgatggccctttcagcctcgagcctcaaccccaccaccctctcctgcctccttcttcctttccttcagcagcatcctctcctcctcgatggtcgcactccgtccgtcaacagcactaccagcagcgggtagcagctcgacccgccggcgagcgtcgccgcctccggctgccgcgcagaccagccggctcgctgccctctcgctccttgcactcgccgctctgccctcggccgctgccggtccgtcccttttcctatttgacacaagcacggtcccaggtcttgctcctcagggagcagagacctcgctcgtcgtgattgcaggacgactgagaagaccctggtcgactgacgcgccccctgtttccctcctgctcttgctccttctctgctcgcctccccttccacaatccctccttccgcccttccgctcgaccctattccccgtggctggctgtcgtccctgcgtgctctcgtcgcccgcttaccctgctcgtcgctgtatccttcttgctcctctcgctacgcctcacttcattcgccttgactgagcaaagccacatatgcgtcgccgtcgtggtactcctcatcgtcgccgtcactcgggcggtcggctgagccagtcgagaagctacggaaggctggcggccggcggcgaccagtgagcgcccgcttgcctcgacctcgctgagcggcagcgcctccatcgacaacagactgcgatttagtaagagcagcatgagatagtaggaagaaggcaacagcgtttgagctagcggtcggaaggaagggagggaacaggtcagtgcgggatctcaagcgaagtttagacgggatgcggcaaggggagggaggaaggaggaggggaggatccgtcttgagattgataggttgatggcattccaagctctccctgttaccaggagagcgaggtatatcaagcgattctgaaagtagaatgtcgtcttgtccttcggggaggtggtagaaagaggctgaagggaggaaagagactcacgaagagggagggaggcccgtcgagaggcgacagggcgcgctgacgacgggccggaccgtgaaagcgtcaggacgcagacacggcaagtgaggaggtcgagtgccggttgctgctggtccagcaaagccggcatcgtcgaggaaggcggtcagggaggcagaagcaggtcgacgtcgagaggcaggtgacaggcgacggagcttttcccgcagagtcgaaaagtcggcgcagggcaaggtttacgcgtaactcgaccgtgcgcggttgtaaggaaacccgcgcagtcgccctgcagcttgcccgttcgccctgtcgctcgtcccttccagctgccatcgccctctcggcgacgactcccagagccaacttaagaggcagcagcaaccaaagcactcgccgcctgcgtacgttcgcctgcttgttccgctgcagccagcctgcacgctcatacgccggcttggaggcctccgcctcgctcggcgctcctgtccccctcatcgctgcgacagtgagctgaccctccggccgtcctttggtcttcacccagagcagcctccaatgagcggctcactaggcgtcgctctgggtcttttctcggcgctgatacgtcctgcccgtcttttgcttactggctcgcaccacctcccgttgtcgccgctcttctcgctcgcacgctcggccagacaggaggaaggcgaagatgcgaccttacctcatgccgaacaagggcgcatctgccctgtagaacacgaactgatcagacctgttctgacccaactccactggccgagcgcgagatcagcggcgcttcgagatttctcggttgcttgctgctcgcctgtcgagtgacttgatggtggtgcactgacccctgtcggccgcttctgcctcttttccgtccagctcgccgctcctcatccactctcctacgctcttgctgccctgttgctcatcgtcggcctgctgctcgcgtcttggcgttacctgggctttcgccgcggttaatcgtctgtcgccaagtgcactcgctcggaccctgccgtgcggctactttcttgaccgtatctcaattcttctctgcagtctgtcacaagcacgtccattaaagaaggatgggcagaccggccagacgaggggaaggaaggacccgtctttgcgctgctcccagaccggtgcgtgtacttcatttaacgcaacttttcacctcgtccgctcgtgatgctcgagacaatccaacgccaatggaccgctgcgcacttgtgcgaggctgccgtgcggaaaggataacgacctgatctctcgctttcctccctcgcccaggtcctcgtacccttttgctaaccttctacactgttgcttttccttcgactacttgctgaagtcagcctcagtcgaaacgactctacgtgcatcctcctaacgttgcctcccgtcgcgcctcaccccgctggacctcgacgcctgccggaggaccctctaaaagggccatcgtcgaccgaaggctgcagagctgttgcttgcgagcgctcaaagcttctggaggtggcctggtaggccaggacgtcgatgagacactcgctgacctactgctcttgtctcgcgttggcagcttgctgccgactaacccggcctacgctcaggtacgtgctgatccaacctagcctcctctcctttcctacagcaggcctaaatgatgtttaagcaggagatgtggagacggtggcctcgctcaggcgaagagacgatgatgccataccttcaactgatcgcttgctcctacgcaacttcaatccgaccggaagtcgaaccgagactgacccgtcctccttattgtgcgacccccgtcaggtctctcagtcgacgggctcgtacgtcgctgcactcgctcgggcgtctttttgccttctattcgctccctcccctgccagaatgaagaagcgcccgccacccagtcagctctcacctgacgtgtcctccctgcactctgagagtgtgcctcctccactcgctggatgagcactcaatgggtggccgtctgaccctccgctcctccttccctccaacgtctttcctttccggcgcttggcttcgctgacgttcctcgccctttgtcgcaggttgggtcgcgctcgcgcaatccacaaataaggcaagtcgctttttcgcatcagccttctcctactcgcccagaatgaagaacttcctgccgctacaaagccttgtcctccgactgcccactcgagccaggacgcgcttgtggacgacctacggcggccatctgacactccctcgttccctcatccttctttctcttgtgccctgacgggagcgctgatctgagttcgcctcctttcacatgcgcaggctcgctctggccgagcccctgaagctcacagtacgtatcttctttttattcttcttcccactctacctctcagcgtgaagacacctttgccaccgcatttcgtagctctctgcagcgttcttccgtctgtcttgcgcatctatgaggacaaaactcttgtaatggctctctgactcaacaacccctcctcctgcctgccgaactgattgagaggagcgtcgactgactcactttcctccgcatcggctcgtcattcgttgcccgtctgggaaacgcgcaggcgtctcgtcatcctcgtcctctccgatttcaagacggtgagccgctcggccgccagaggtgcgtctccattgtgcccgacgtctgccgagcgtgggcgcggtgcgctgacggtgctgtcatcggccgctacctcttccggcttcgtcgcaggttcggtcgtcgctttcagccttgttcgaagtagcgtcgcatgctcgtcgtccgctcgaaggatgggcggcaaacccggctcgtaatcaccgatctcaacaagtgccgtcgatcgcggtcgcgctcgcacccgacgttgaaccaagacgcgtcggccaggtcgaccttccgcattcggcctcgaaaacgcgtcgtcggcgcgtcggcggcgttggcgaggcattcttcgcacgcagatcgcctcctttgcgtccgtcgaacgggccctcggccttgttgattgagagaccacaaggccagaaaaggaccagggtagaaacgtgagtctcgaggtaacgggccctcttcaaagcgccctcagaccctcacctcccttcctccttcatttcctcttcagtgtagagcaggtctctgtcgcttcccttctccttcacctcccgtctcgtctcgccctcgagccgcacgtcatttccacctccgagccggtctcgttccttagccctcctctcgccgcgccacctcctccctcttcaactcttcattcaacctcccaagccttcgacaatgtacggcttcttcacgtccccgcctggctcgcccaagtcgcggacccgccgccagagccccctgccgtcgtctcacgacgacttcaagccggcagcctcgttcgcgcaccaccggcagcaccggtcgtcgtccgccttcctctcgatctcgtccctgctcgcgctggccaacctgcccgactcgcagcactcgcgtcgccggctcagcaggatcggcgtcttcctcggttgcctctttgtcattgccttcgtcatcgtcaaccgcggctccgaggctcgctggctgcacaagctaccgagcgtgcagcaggctggccctgcgccggtgacgcgcgctcagcttaccgcccgagcaatgtacggcggcgacgagcagtggaagacgatgatggcctcaggtccgtctctcacaatcctcccacccgaacgaacgcccagttcacccgatcgaccgtctctctctagcacccatgcagaatatcgtcatgcagaatatcgttgcacctcggcctgccggcgcgagctcgattgtcatgcccaactcggccccgctcagcccgaccgaggagctcgccggcctcgtccactacattacctcgacccatcacggcgtcctccctccgtccacgtttgatggctacgcaccggcgacgacgccccttcacgccgactgggtcctcgactttgagcccggtccgcccggcccggcccgcgagacgatgatgcgcgacttccaggaggaggtctggtccgacgcccgcttcatcgtcattggccggcagcgggccgacggctacatctttgacgagacggtcaagctcctccacgacagctacctgctccgggcgggcgagtttgagatgatcgacatcgaggcccgaggtgcgtcgtccctcagtggtccattgcgtgcgaagccttcgacgctgacccgctgccgttcctcattgacagaggactctgagattctcgagcccgtcctcaagcggctcgtgccctcgcactcgctcccggtcgtctatctccgcgggacgctcctcggctctctggacgagctcaaggcgctgcacgaggccgacctgctcaagccgatgatggacgccgccgagcttcgcttcgacaagcccaaggtcaagcggcgcccgatccgctacgtccagcgggacgagtgatgggccgccctgcgctcaaagctggattccgacgaacgctggtcgctcgcccgagatattctccccccctctcacactgtcgctgcgcctccggcgctcgcgacaacctgatcccaccctccatatatgtcatctcatgtcaaccttacggcttgatggaccgagctgagacagtgcgagcgatgcgaggcatgagcgttaggactggacgaagtcaggcgcgtcctttcggccggtcgcgtcgagagcgtcgagcttgctgccgctgagcaacgtcgaccctctcccctcgcctctctctcgaagctcaactgccacactccctgctagcaggttcccgctggacggcctctactcagctctgcggatgacctgagccggcacccctcgccgtcagctgctgctccgcgctcctgccgctgtacggctcgctcccgccgcctcattgctcgccatggctgcagctcgaggaggtcacccacctctacctctcctacggctcctctacgcttgtacaaccaatctggaagccttccttggaccgcttctggacgagcgagaccgagcgacactcgtgaccgaaacggacccgccggcattccgggagctcctccaacggacggtcgtcgcgctcgaagacgactacaaggcgccatcgcgaccctggcggacgctccaggccgccgaagcagcagaaatgaagggggtgcgtctttcagcccttgcattgctgttttaagaagctctcgctgacctgccgtgctgctggtgtcaggcgatcgaccacgcgatgctggccatctttgagcgagcttcgccggccaaaccttcgaaccagctgacgatgggcttcacgtcgtccgagttcagctaccaggtgcgtgccggtccatgctcgagcaggtgcactcacctgacggccgtcgcaacgcctcctcttaggcgacggtcaaggagctgccggtcttcaacgccgcccggccgaacatctatgcgacacacgtcaattcgacccacaacgtctttggctcagcagcttggcggacgctgctgatgcgcatcggcatgggaccaattgtccaccttctgtctcgcacgagcgtctttgttaacctgaagaatggctgcctgctgcaggtcgccggccggcccgtcgtcgagatcaagccgccgaagacgacatcacaagggccgaaatgcaaggccggtgtcgaaccgaccaggcccgattttgaccaggacgatgcgccgcccgaccgcaagcgtcgtaagggccgcaactcgcagcagcgcaagcgcaaggcggcagcgaccccgctgcctccggagccgcccaaaggcgatgagggcgagttgatggactgggactcgttcgactactcattcgccttctcgcccggtgtcgacgacgccgacatcgaagccgaactcaatccgcaacttcgtccgccgccgaaacgggctcgtatgtcggccaacccgcccgcggcgtaagtccgcctcgccgagcgcctcacaccaagtaacgatcgctgaccgccctcgttcgtcccttcgtagcgtaacgcctgcagatctgtccatacctcgcaatcgcatcttctacgccaagccaatggtccgtcgggcgcggcttccgtctcagaaacggatcgtctgcggcctgccagaggatcgtgagtcttctcccctctgtctgcctgttctcggcgcggctgaccgtgtcaacgcccgacctcagacgtcttaaactttcgtccggatgagagcacgactgcgtcgaagaaaactgatgtcgcgacccaaccgcggccgcacccgctcgctctgcttatgcacatcttcccgcgtcagttcgggctcaacaacgtcttcacgacgaccccggcggcttttgcctcgaccggcagcatcaactacggtgatgctccgacgagggcggccgaaattgcgtctcggcgctcgagtgctgtcgggctcaaggtcgacaagaagagccggatgcggagcccaatgctgcaggctgtcgtggagggcattcgcacgcgctggcaggtcgaggacgtctggaagctgcgggcaatttgctgcccgagcaaggttcgttcagcatttgcccctccccgcctaatcatctgacgagttcctctgcccttccagaccaagctgacgaaggtcgcatcggacactgccgcgcaagccgaggtctcgctacccgtcgtacgtgcacgcgcagcgccctgtaatgccaatcgaagctgattgcttggcctttgacatccgagcaggagtttgtgacgcagccacctgcagcagaggacgcctggcagccgctgttgaccgctcactcggctgccgtcgagatttgcacgcagaagagcgtctccaccatgcgccttgacgactcgctgtcgacaatgctccctcatggcgaagaggaagcccgggcggcggctacggccaaggcgcaaaagttcgtcagctacacgcagccaatctcccaggtgcgccgcctcctcgtcctaaccggtgccgcttctacctctgacgtgcacccctgtctgtcggcaggtcacgcgttttgtgactggcgtattcaagcgcgtcttcacgctcgacgtgctcggcagcgacctcaaccaggaaatcgtgctccgccgtgcgcacgctttctgccagaggcaggtcgcctccagctgacgaagacttcgtcactccgcagacgtcgcaacgtttctccggcagcggcgcttcgagtcgtgcaccctacactcgatcctccaaggcttcagggtcatggactgcgcttggcttcagccagctggcttcgtcgagggctctcgtgtcaccgaaggcgacgctaagaagcgcagggagctgctcgccgaatttctctggtggctcttcgatggcttcctaatccctttgctgaaggtcggtgctggtcatttgcggcgcttggcagcccgagctcatgatctgccctccctcgcagaccaccttttacgtcactgagagcgccgcctacaaaaaggaggtcctctactttcgtcaggatgactgggacgtcatcagccgaccgattctcaagcagctccaggcaaccgtttacaagcaagtgccggacgtacgtttctgactgctctgtcggctgagcacctcagtaaagctgactcctcttgtccagtttgaggcagacaaggtcatcggaggcggctaccggcagctgggtcactcgcagatccgactgctgccgaaggagaccggcgtcaggccgatcatcaatctccggcgcaagccaaaaaagccagccgacggcgcaccgtacgacaagggcgccgaaaagtcgatcaacgctcgtctcgcagagtcctttagcgtacttgtccatcacaaggtgagctgattcgagcactgactgccgaaggcgcgatgctgacctcctcaaatcatcaacagtcggtcgaccccgagatctttggctcttcgatccttggcgcggacgacatctacccccgcctgtgcgccttccgcgaccgagcgcaacttcccgacggctcgatgtacgtcgactgagcagcgtcgttgatggacggtcggtcggctgaccttgcctgctctccttccaacgcaggccgaggctctactttgccaaggtcgacgtccgctcgtgtttcgacacgatcgagcagagcacactcctggacgtcctgaacgaccttctcgacgaggtgcgcttcggtagagcttgttcatcaaacccgcggctgatcgtgcttcttgctcgtcggcagtacgaggactacgagatcacccactacaacaaggcgaagatgactggcggccagatcaaaaagcgcttcctcaagcaggccttccagcacggtgcgctgacttcattcgtcctgatcgagtgattagccgactgacgttgagctgtctcgcgtcaggcacgacgccttccttccccgaccaggcgactgctatgtcgcacggccactcgaaagaggtcctgatggacaaggtctgtctccactcagtccttaattcgttcgagcgcgactgacccgtgtccttccgagcacaggcgcacagcttgttcatcagccgcgatcaggtcgccgcgctccttcgagagcacatccgaagcaacacaattaaggtgcgagagggctagacgtccttcttcagagtcagccgaggctgacgcctgtcctcctgaacggtagatcgggagctccttcttccggcaggccaagggcatcccgcaaggcagtgtcgtctcgacctacctctgcagcctcttttatgcggacatggagcgcaaacacctcgctttcacgcagagcccggacagcgtacgtcaccccttcaaaccaggtcggccctgatcggctatgatgctgacatgatgccttttacacgtcaaagatgctcgtccggctcgtcgacgatttcttactcgttacgaccgtgcgtctcgttctcctacttctgcttggcacgcgtctgatgcttctcttgtcgcatgtctaggaccgagataaagccgctcacttcgtccggacgatgcatgccggtacgtcgccgatttacactcctcaacagctgaggctgaacctcttgacttgacctcgcaggccacccaaagtacggctgctacgtcgcgcccgagaagacgctgctcagcgggttcgagtgcgccgtcgtcaaccaggcgacgcccaaggtgctcatcggcggtgagtggcgcggcggctgcgctattgcttacccgactgcagctgacatctgtgccttgcagaccgtttcccttggtgtggtcggctgatcgacactcggaccctggcgatgatgggcgactacacgcgcgacacgggcagtgagtcggcctgcatcctcacctcacaacggtcggtcgcgaactatgctgacccctctatcccctgtccgcactcagacatcaaaaacactctgacggtcgacatccgacgacaaccaggcatcagcctccggtcgaaaattctccggtgcgcaccagcggcgaactgctttgtgccaaattggtcgctgacggcccttgcttgtggctggacagcaacgtcgctcttaagagctcgatcgccttcaacgacaccagtctcaacccgcgagccgttgtgtacgccaacatctaccagaatgtcgcccacggcgcgatgaaggccgtccatctcgccgccgcgctcggctttgacgtcaagttgcacgctgcataccttctgagtgagcctggcatctgccgctgcaggcgacggttgaatctgacggcatgtccatctaccaggggtcatcgacgaggtcggcggctttgctcacgcaaccgtcgtcaatggcgccaagaccaaaccagcgctggcagcaggcgccgaggtcaacgttgacaaggccgtaatctgctggtacgcccggcgggctgtatgctctcacatccccgagctgatccgccgaccttttctttatccttctcccgcctcaggctcagcaagcatgccttccaccgcgtcctctcggccaagcagacgaaattcgcgccggtcgtcaaggcccttcacgccgaactcgcgcagggcccgaacccgtgcgccgccgcagggctcgaggcctgggagacggtcgtcgagcacgcgtgggagggcgtcaagggcgtcatctactgatggtgctatctatggtcccgtccctctccaaaaattcttgcgaggtcatcttgagcgagcaggacggtcgggaacgatggcggccgtgctaccaccgtgcgcgcgcagttcgtcgtggctaagagaagctccaagagcagcagctagcctgccttcaaaacaacagcactcgacaacgagagcaagggtactcaaccggactacggctgtctctcgtgtcacgacgcttgcttgcagtgttggagggccctgctcccttacggccgagctgaaggtcgcccgtcggcccgcagctcgctctcactctcccaaccctcatctcgccacgcctctcgcctcgtcccttccttcagtcgccgactacagatggactcgtcagctccagtcgcttctggctcgggctcgcgcccgctctaccaagagtcgtctcagttccggcactggcgcttctcgcccgccaagctggccggcctccgaagggagctcaacacgcgggctgtcgctgtggtcaaggacaatatgcgggccgaggcggtgcgtcccggtggatgtcgcgctgaggagcttccagagctgtctgtgctaatcttgagatgtctctcggtcgcctcatcgtctgtaggaggcagcaaaggagctgtcggtggccgagggcaagctgcccgagccagcgttatcgaccgcctcgtcgtcgtcctcgacgcctgcacctcctgcaattcaggacctctcaaccgtgccgtatctcgagccggccgacgagctcctcctcatccgctactacagctcgacgatcccgcggacatgcgccggctttggcttcccggaggcgatcgaggcgacggcgacgagctacttcaagcgcttctacctctggaacacgacgatggactatcacccgcgcaaggtcatgtgcgtcgccttgaatgcttctcgtcatctccgcgttcagctcagtgctgacgcgaactcgacgacgcgcaggccgacctgcctctttctcgcgctcaagactgagaacacgacgatcccgctcggcgactttgtcaagcgcttctcaaagctctcggaggacgacctccttgcacttgagtttacgctcgctcagtcgctcaaatttgagttcaccgtctggcacgctcacaaggcgctgcgtgggttcctgctcgacttccaggtgcgtccgcgcgcaccatggtcgcttgtgcgcgctcgctgacgtctcttcctgatcgtcccgctgcagtcggtggcggagatcgatcacactgatctcgtgcgggctgtcgccgacgctcagccttacatcgcctcatcacggcagacggacctcgagcttctgtacgcgccgtcgcagattgcactcgcctgcctatcactcgccgcgccctcgctcgtcgcgacttaccttaaggcgaagcatcccggtctcgagggccagctcgagcgcgatcggctccagcagatcatccaggacgtcggacgcgagatcgtccgcagtcagggcgagtcggtcgacatgacccgcgtcaaggagatcgaccggaggctccggacgtgctcgaacccggagaaaatccccggctcggcattgtacgttcgaccaggatgtgctgctcgccgactacgactaacctcgattgccttttgtgtcgctcaggtatcggaagcgggttgcgcaggacgagctcgaggaggcgacgaagcgagcggccaagcagctccgggacgaggaggccaaggccagggacgccgccgtctttggtggaagcctcaacccgatccctccggcggccgacggcgtcggtggcggtgttgccggtaccggcctgtttgacctcgcgcaggagaagcgggtaccgctgagtccgaggcccgcgcagcagaatgacggcggcgttgccaggccggtcgtcgatgtgtgatggatagcgttctaccgtcgtcggcagtagtgtcatctcacgctcggcaaagcagcagccgttctcatcgcccgctgccgagttcctcctaacgtgcaagtgggctggactgccggctgcgcgccgccgcctcatctcacggccccgtacgccctaccctccgtcttcacaacaaaagcgtcacgcatcacgaaggacatgcagagcaagaagggggatgtagataagttactatacaagcgtcttcgtgggcacggcgaagactgctagcgaatcagatccttggttctccgtcccgaatgttatgacctcccgccgtttatggtacgaagggggaagcgataagctggtgagatgaagaagacagaaaggtcagcgtcaaagcaccgtacagcagcagcagacaagaaggacgcacgatgagggacgtggttcggcaggacgacgcgcccgggatacgatcagcctgaaaaggcccgccgagcggcgccggccgatgcaccgcaatttccgacctagggttaggctctcggcgcgtcgctcgccagaggagacgcgccggtcagtcattgaggcctcgatgtcggtctgactcgaggtcagggagcggcagatgggacaggcaggtctgatgaatgcttgcctgatgtgctgcgtgtgagcgagggagtagtccgccaggagggaccgcgtctcatcagcccgtccggcgtcacctcgtcgtctcgacctgacttccgaccgtcaacacccgcgacaatccttgcaccccttctcaataactctgcctttgacagcagcagcgcaccagcccgtcgccgtcattcgacgctcgccttctctccaggcgctgtctgggcgccagacgccccgttcgctcgcgcccggcagccaccgccagttgtcgatcgacggcacgagctctggcagaatgccctcgccctcacgctcgtccttcatgctaccccggccagtgacgtcgtcctcatcgccgctgccgacgaccttctcgtcgctgccgcgcatctcgcgcgaccacaagcgctcgttgcttcggccctggatcgcgagctcgcccaccgccttctcgcactcaagctcggcctcgtacggcgggccggcgacgccaggcgagcacttcggccaggtcctccggtcccgcagccggatcaccaacctcggcgtctacatcctgctcggcctgcttgcgttcagcgtcctcgccaacgtccgcgtctggctcgagggcggcggcgtccactgggcgagcgaccgcgtcggcaaccgacagcatccttggccggaagtgccaagtaagcatctgcccgagtcgagtcgcctgccgcagtcggtcgtcaatacgctcgcaccgatttcgccggaactcgaggatgttgaacacctgatcgtcgtcgcagggttcgtccttcgaccttctgccagacgggctgcgcagctgacccgctccttcgctctcgttgcccaggcacgccatctatattggcacagaccctgtgctcaaggcgcaggacgaccaatggatcctcgagccgatccaaaagggcgggccgacggtcagggcgctcattgcgcacatcgaggccgggtgtgtcttggtcggaaatcgatcgcctattgcgcgcttcactgacacctacgccctgcgcttttcacagtgcgcgcttggcggtcgaagatccaaagtcgctgctcgtctacagcggtggtcaaactcgcccgtcaggtgcggccacgagctgctctgtcagctactgattgcaacggtgctgacttctggccgcctcttcagccctgacgaccgaaggcgagtcgtacctccgactggcactctcaacctccctgttacccttctcggcgccgccgtcgacgccgttccctcgcgcgacgacggaagcctttgcgctcgactcgtacgagaacttgctcttttcgatcgcgcgcttcaaagaggtcgtcggccgctacccgtcgcgcgtcacggtcgtcggctttgccgtcaaggaggctcgtttccgcgagctccaccgcaagacgatcggcttcccgctcgagcactttgattatgtcggcatcgaccaggacagcgacctcgaggccttccgccggggcgagctcgagtttggctaccggccgttcgtccgcgacccgaccggctgccggacgccgctcgtcagcaagcgcatcgggcgcaacgtcggccggcgctggccgagctaccatatgagcgcgcccgaaatgcgcggtctgctcgagtggtgtccgatgccggacgagatcaatcggctgacgggtcacgagtgggacggcattctgccgtggaacctgtgacgcgctcttcccttcctatcctagatatcatgtcttgtcgatgcttctgccttacatatgactattgttgtacctcacactccctcctctaccactctatgcgctcgcccttccagtcgcgcagctggccgccgtcttctctccgaagacccttgacgacggcctcccacttgcggacggcctcatcgacggcaaagaggccgtgtgcgtcgccctcaggcttgtcccgcgccacaaacggcgcagagagatccgtcttgaccgtcccgggatgataggcgaccgccaccgccgagctcttcttaacggcaagctcgagttggaggttctttatcgcggcgttcgttccggccttggtcgcccgatagctcgtccagccgccgagccggttgtccgagatcgatgcgacccgggcggtgagcgacatgcaaagcgagaggtcgtccggcaggagaccgatcgggattgagctctcgcgtttgaggacgagcgccgacggaatgagcggcgtaaagtgcgcgtaggtgagaaggtgcgagagcgtgttgacgcggaacgacgagagggccgactcggccgtgatctgcgcaaaggccttctctggatgcagctagaagaaaaccaaagcagcaagagaaggaagagcgagagatcgtcagctctgctgcaagagatcgatggccgggagcaaagacgtaccacgccgttcgagcagaggacgagccggacgctgcccttgccccactcgctctcggccgccttgcttgcagcccggagctggtcatcgacctcgtcgctcatcgcgtcgacctcgaagcacctgacccggctcttgacgttctggccgcctgcttcttggaggagggcgagcgtttcggacggcttgcgcgagaggcagacgagcgagagcggcgtcgtccgaaggaggtggcgggcgacgccgaggccgatgcctgagctgcagccagagagtacggcaaccgagggcatggcgtggactggtcagtgagagatggtggttggcggcgaagtgagagccgacggtcgatctcagccggaggaccatcggagggccgtcgcgcagcaagctgctgctcatcatcggccggtcccggcggcggccgaagagcgcgagcagcaaacggccaccagccttcctcttcgacgacttgcaggatggcacgcgcgacgcacagcggctggtcctccagcggtggcgaggacggcatcccgctcgtcgacgtgccgtacgcaacgaggcagcggccgggctggctgcctcagcgagggcagcagcagcacgccgaccgccaagccgaggacgacgcccggctcgcaggggacgacgaagggcccaagcaggaggcctcaacctcgacctcaagcggcagcgcgagcagcgacacgcgcagaggctcgctcggagccgactcggtcaagggacctctgcctggaggaggtcccgttcggccggcagcgaatggtcgggccgacacgcaccacgacggcgagagcctgcccttgccggtgctcaactcgtcacctagctccccaccacctagcccgatctcatcgcaatgcccgcctccgtcggagaagcgagtcgtccgcgttggccagtggatcgcgcgcttcctggcaggcccgtcgccgccgcagcgattgccctacattggcgactcgctcgcgctcgcggtcaccctccctcactacggccgactatcgatcaaccccgacgcctggttcgcccgggtgtacctctcgcgctttgggcggcgcttcccgccagggtcgtaccggcacggcgcgcttctcttcgtgttccttgcggcctggctcgtcggctttgccttcctcgtccgggccaactcgttccagagcgcgacggaaccgagcgatggctccggcgtcaccttcctcggctgcaccgacaaattcgccggcgcgagggatagctgcgggcttgacttcgtcgacgtgcgtgggcccagctggcgtcctagagtcgttgcgcttgtgctgaccctgcgtcttgaccgtcgcccgcagtgcgccgactctggcgacctaaccttccgctgcccggccggatgcgcgtcgcagctgatctataacacggttcgtctctctaaaactgtggttattcgacgtcaaggctgacacagctcgcattgacgctgcccaggtcgccgtcggcaacctccagccggacggcgtgcccttcgtcatcggcggaggacagacggacgggcctccagtctatcgtgccgagtgcggcaagcccctcactcagctggttgaacaggcgtcactaactccttcccttccgccagctccttcatttgctcggcctacgtccactcgggcttggtctcaaacagccggggcggctgcggcgttgtcagcctgctccagaatgtgacgggcttccctgcttcattcgcgcacggcattcatgtgcgaatttctgttgtgttggtccgccgacgcagtcgttgagtcttacctccctcacgcatgcagtcgctgcccttcccgagcacctatccgctggccttcaccttcgccgaggtcaactcgatccgctgcgaggacctccgatgggagatccttggcttcaatgtcgccatgggcgtcgtcttcagtctctttctcaatccaggcccgctcgtctttctctggatactcgtctgcgtctcgtactggcagtgagttcccgaccctttcgcacgacgctctcaccgacgctgactatcattctcggcccacctctagcgtcatcctcatctcagaccctcgcgcttaccctcccatcatgtcggacgccttccaggacttcatccccgtcctcctcgtcggctacttcttctggcgggtcgcctttcgcttcacgctgccgtcgttcgcctcgcacgcactcgagcgaacgatttggtatcttggccccttttggtgcgggacgctcctcaacgtcgtcaccgagagcatccagatcgaccggctcggtggcggcaacatcaaggccgtcggctcgttcgtcgccctcatcatcgtcattgtcatcctcgccggctggcagatttcggtcgcctggcggaccgggtggctgccgttctacctccgctggacggccgccggcgggctcgtcctcctcgtgctctcgcagctgcccgacctcatcttccgtctccaccactacgcattcacgctgatctttacgccgtacgtctgccttcccgtcctcattacttgcgccagctgctgacctcctgctgtccacagggcgctcggcttcgccacccgcgtctcggccgctctccaaggcctcctgctcggtatcttcgccaacggcgtcggcaagttcagcttcgagtcgatcctcgagacggccgccgagcttcggcgagatgccgccttcggctccgacctgccggtcctgcagaccaactcaagcacatggccggcctacacgggcgaactcttcaatcaggctgccctccggtgggagccgatcccggccgcgctcgcgagcgattggaacggcttcagtctgctcgtggacgacgtcgagcgctacgccgggccggcaacgagtgcgaccacagcttaatcttcgcgagtctagccgcatgctgacgcatctctgacctgaacctgcccgacagatttctcgctggccgcgttcgacgacaccttaccgcacttcttccggctggctgtacgttccctcctctgaccagacatcaatcttgcaggccctgaatgcgctctctaccctcaccagtaccagctcgacggcgtctcgggcgactacatccgagcggcgacctggtggccaaacggcacctgggtcgatccggccgagggcccgtcataggcgcggcccataatctctggtcaatcggaccggctgcacactcaagaaccagtcatcgctgacaccttcaggccctcttcaaattcatgccctgtaccaccactagagtcagttgcgtcgaagctaacctcaagcccaatggcagctgctgacgcccagacttccttttctcgaccacagtctctgtctctcacatccgaatctccttgatcgcatcttgcccttctctatcatgacctgacctcccatgtcgtcctgagtcttgacggaagctgcttgggcaagttgaccggagcgctgcgcgaaccggcgatctgcgcgctcgagacggctcacctcgacgcgacctgaacgtcgacgtcctcctcgcttcccgttcctttgagactaacgtcctccgttttagcaaaagcgaaggatgtccagcatctgctcactctgtacctgtcatgctgacgacggtgccgccttcagctgagctctccgcgactgtcaacgacgtcccgaccataccggcagctcgcctcgagagcaacagctcgagcagcagctcgagcagctcctcgggcgacagcgactcggcctcgggctgcagcgtcagcagcgacgaagagtactaccagatgcccttctggtactacaacaagatacgaaaacggggttaggggggaagccatcgtgcccacagtcagtcggccttctcgcccctgtcatctctactccttgccgctcgctgacacggccgcccgactttcaacagtcgagtttgtcttcgagaacctcgttattgaagtctaccaggacggccagccggttgacatgctcatttccgagttgaccctcgagtactggccgatctcaaagaagcggacggtcctttagcgcgagccgctcccggtcgtcttcagcctcgcccagcgcaccaagttgttcgtctttaagctcgtctcggaggaggtcgccgcccgtttccgcgagctctatcggtaccgggaacctgcaacctgggaacgcattcgcgggcgccggatgcctggcatccttcggcctatcgaggtcaacgaggagaacctcctggaggagccgcaaggtgagggaggcctcgcaggcgcagcagcagcagcggccagagaagccgccccaaacgaagcagcaccggtcgcagcctccctcgtcacagaggaagatcaaggttaagaagaagcttgctcagactcggtcggacagcatcggggatcagtcggacgagggtcttgcggcgtccgtgcgcgacaacgacgacgacggcacccgagcgtgcgtcaacagctgcgacccttcacatttccccactcactaagacttacttcgggccttttagtcgttctccaagtcgcaattcctcctccgtgagctgcgctctggccggcagctggcttcgccttccgcagctgtcacctgcttgtcgcgtgcaccgcccgcgtccacgctcagttaatcggcatccatccggcacggcaagcggaaggcgacgacgctcagcccgaaggcttcgagtgagccggacggagagcagctgatgcctgaccgcgggcgggtcaaccggaagccaaagaaattgtctcccgacgatcaggtcggtcgtgccagttctctgcccgagcgaagcggtcgctgacctagttgtactttctcaagctgccgcctgagccttggttccgtatggatgccggcggcgacctcatactcatgacgagcgacgaccgctacgctcgggtctcggagcggcgtctccggtcagaggtccgggcgttcgactcacatctgccggacgacctcagcgtgctcccggccaacaacgaaaacagcgcgaatatccaccgccagtcttgcatactcgttctcacatgccctccttttccataccttacgatctgcaagactcctgacgattctgcgcgacgacaagtggcgtaattagcggcgacgcatgaccgccaggtcgatcgccctgcggccgacttgggcgcgcgggcgacggacgcgtctccctcgccctccccctcgttcttcgaacatcgctcgagcacccaatctcagtccgaacgtttcccctcgagaccacctaccgtcatgaagcagcgtccggaagccggcccgtcgctcaagcgcggtcttccagctgaggcggacgacacgcgagccgccgcgctcgacccgcaggccgctccttcgtcgcccaagcgcgggaagctgcagcacaatctcgagccggcacgtccagcttcagctaggcccgtgctgtcgaagcggaggctggaagctgaccagtgtcttcttcttgcgcccccaggcgtccaactcgcgagcgcggacgagcaacacgcccaagggcagcaaggtcagctcggaccaccccgcgcacgggctcgaccgtctccgcgcgccagtatcagagcctgactgccttctcccctcaccttgcggcagcaggcccgcacaacctcggtcagctcgactgcgccactaggcgatagccctcagcggtcgacctcgtctcgggcgccgtcggtcgtcggcggacgcgtcggcgacaaggcgacggccaagcaacaggcgacgctgcgcaagcacatcctcgtcgccaacccgaccctggcctcgcaggagccgctgcttgagcaggtcgccaccgtcatgaaggacacctggtcatgggacgagcttcggaagttcttcctccgcaagaccgagatgcgcgagaatgtccaggcgacgctcgagctcatccgcgacgacatggacgaggatgaggaggcggatgagctgcccgctgccgccgtcgaatctacgtcgagcgaccaccgggcgaccgagtctgctgaggagggcgaggtgctcgagacgaagccagcggtccaggcggctccgctacccaccgagcggctcgcggcggaacaggctgctactccattcgcagcaccgctacatagcgcagcgaaaccgccggcagccccgcctgcagtcgccgagaaagctgtgtcggctgcctcgacgtcggcgcaagagccgaaggacgtccttggtccgacctcggtcgtcgccaggaaaaagtcgaacaagcacctgtcgtccgagcaggcgatccagctggcgcgcgagaaggcgctcgcgacgggcaaggcctggatcgagccagccaagaagaaggcgatgacggcccttcggactgagaccgaggctcagctcgggcgaggcgactttcactcgttcggggctgaggatcaggtacgtcggagctctcgtcgctgcagatgtagactgggcctgacccatactccatgaccagactggccgcaatttcggcgcgatccaggacgtccggctgctcagcaagaaggcgcgctgtgcgctcatcgccgtcgtcgtctcgtgcgacatccgaccgccgttgcgtagtgcgtcctatgccgcacatcgagaacgctgccgagggctgacgttcagtcaccttgttcttcagcggacgcgctcgccagcatcaagctgcaggatccgaccgggacgattgcgctcaacgcctttgccaagacggttgagctgctgcccaatccgcccatcgggtccatcctcttcttgcgcaacatctatgtgaggccttgcactgccgcttcaagcaagaagcctgctcgctgacgagccgattcgcatcgccctttgcaggttgacatctggcagggcaactatacggtcgtcggcagtgccatggacggctacgactgggcctatgcggacctcaaggtgacgtcaatgacgtgcccggcacgcgcgaccgcccaatacggcagcctcgaggccctgagcgcgagccagcacgtttacgcccagaagctcagctcctgggcgcgattctcgctcggtctccgcgaaactgcgccgggcgcggcaaccgtcatcgccgagaatgcgccgatccagatcgtcgccaagaaaaagcgggcgcggatggtggtcgaggagctaacggagacgaccgagtttttcgatctcgtcgcccaggtatgtcggcctcgctttggctcttctgtggacgaggcctctgacatgatgcgcccctcccctcagatcgtcaaggtcggcccgatcggcgcagagacgcgcgacatctttatcaccgacttctcggcgaaccctcgtctcttcaagtttgatctccgctcgccgctgcttgccgaggcccagaagccgagcgagccttttggccgctactgcctcaagatgagcatcttcaacgagctcgccaaggccgacaactctagcctcagcgtcggcaagattgtcaagttccgcaacgccaaagtccgcatgcgcgactttctcgagggctcgctctggggcgaccagcacagcggctgccgtatagagcgcctcggtctggccgacgagggcgtgccggagcttgtcgagtgcgtctttctgctgcgctcctctctgccgtcgttcgcacgggctaacgaccgtcttcttttcggcccgccgcagacgccgctcgatatttgttcaggcgctttgtgccgagcaaggcgagcaccctccatcgatgcttggggcggggccctcccggccaatagcctcggcgacgccctgggagaaccctccgtacccgatcctcaccatccgggaggcgatggaggcttcaactttctgctgcttcggccaggtacgtgctcgccatcgtccatgagtatatgccggccagctgatcccactcgctgcttccttcccctcagatcgtcgcaatcagccagtccttccaggctcccgaagacgataagttttaccggtcgttcaaggtgaccgactttaccgcccatccacgcatcaaggacgagactgagggcgacccgggcacgccgtcgacgcctcccaggcgggctttcggtcgcttcacactccgagtcctgctctcgggtcccgacgcgacagacaacagggccgacgcctggcggacgggcgactacctcttctttgtcggcctccgcgtcaacggcaagggcggtcgcgggctcgaggcttacttccacaccgacggccagcctcagccgtacccgatcgtccccgtcccgtcgccgtgcgctgcgctcggcccgctcctcaggtgcgtcctgctgcacaccagagccgcccttcctgcagatgactgacgagtctctcctgatgcgctcccaggcaaaagagcgcgttttactcgcttattgagtcgcccatccccgacgagccggtctaccaagcggctgccgagtgcgcttcgccgctgctgccgacggaggaaggcgaagagcttccttatgtggcgctgctagacccgcaggagcccatggacctcgacagcattctgaacaagcccttgccaaagggctctgcggcaccggtcgatcggttccgccttctccagaacgctgccgtcaactcggtcattgatggcgtcttccaggtttgtcggcctccctgcgggccatgcgaggtgcgccactgaccgtcctattttgtccgcccagattgtcaaggtccaagccttcttcgccagccaagcctccctcctcgtgaccgactggaccgagcacgcgctgatcaccgagcgctatccacctctaccggatgccgaggtcgtcaatgtcgaagagccgttcggccgctacgtgctcgaagtgcaggtcctgcacccgggcctgctcgccgaccgcgactttctcgacgcccttgccccgggcgccgtcgttcggctgagcggcctcatgctttctcggacgccgaacgccagtgtccgagggcatctcaccaagagtcacagctcggcgtgggagcgcgtccgcgaggagagtcaggagcaccaggtgctcgccctgctgaggtgcgcccagcttatgaccgcctcatcgtctggattagtcattgagtctgacagcttttctccgctaccgacagccgacgggcggcgacctaccagctgggcgcgacgcagctcgaagctgctcaggaggaatctgtcgccagcgcggcggcttcgccgttcgcgacggccgaggccgagcctctggccaagacacccagtgcatccccctctccacccgttgcggccgagcttgacgtcgagatggaggatgccaagccaaacctcgagtcgttcgaagtgtcaccgagtgcgttttcccctcgctcatctgcaatggctcctgcgctgaccaccttcctctgcctgcctccttttccagcacaatcgtgggcttccggagagcgaatcctgctcaaggaggtcctcagctcgtcggtgccgtcgaaacacacgatccggactcgagtcgttgactacatgtaggtccttcgccagccgtagctacacgtcttttctccgctgatccctcttatgacatatgtaacaggccgaaaaagctcgaggacatggttgtctgcatctgccgcgcgtgcaaccatttgtgagcacccacgagcgatcgattcctggcgctaagctcgctgaccagaccccgacgtctccctccgcgcagcctgcccaccgaggaccgtgtctgccggtcatgcatgagccagcacgacgcctcgctcggccacgacctcgagtggacctatcggctgatgctcaagctaagcgatgggtcggcgacagtctgggcggcgctcttcagcgaggactttgtgagcccgactccctcgctcgttggcttcccgcatcgctgacgacgcctggtcctcctgcgctagacggccctcttcccttcgctgccgccggccagcgactactgcgacgctgcgacgcagattgtcgatctgcttgcgtcccagctggcgaccctccacccggcgatcggcagccaaggagaggccggcgcgacgtcggccctgcctgccggcccggaactcgagctcggcctcaagaccacagtcctcgtgcacggccttgagggcgtcgacgacatggaggacgagccgacggctgccttccgtaccttccggacggtacttcgcggccaggatgacgacgacgagcggcgctgatatgcagggaggccttcgctgcctcgcaagacggggaatgatgacgactgtaacgaccttctttgactgaaacagcaagacaggaaacaggtcgtagacagggtgcatggcatcgcgcagtcgacgagagaggtagcggcgaggtccaccaagaggagtgccgggcgctgcatcgcggcgtcccgatgaggccgatgtcggccggcgggccgtctggtcgagagaggaagagctcttccgagagcgggacccgaggcggccaaaagatgcgcgagcggcgataggcacaagcgcgagccgaccggtgcccgacgtcagactaggagcaggcgtgaaccagcagccggcgtgctgagggccgtgggtcgaagcttcgtatcgcccgaggtcaacgagcgagaagggatatccaatgaggaccgagacgagccagcaccctttacaggacccagccagcgccctcgcgcttcgggtcctccttgcgccgccagaccaggatgtacttgtcgccattgttgcgggcgaccttcttgccctcctcggtcgagtcgtggatcgcggcgatgcacggatcggccttgtactcggccgagtcggccgacatgggctcaaagaggtcgggcagggcgagaaagtggcgctcggtccagaggtgaaggtctgggtgcggtgagtaagagggtggtcagcaacggaacgcatagacgggaaagggcagggcagagagcagaaggaggcgaagaggtgggagatcagggtatggggatcgtggagatcaatcaaaaccaggtccaaaagatggggtcttcgtctaattaaaacttattttgagcatcatgtaaaggaggtgattgggtgggtgagagagaggaaaacgggaggggcgacgcaccatggacgtcggtgatgcaatagacgatgccgccaggccgaaggacgtaggcgtactcggcgaggagcgtcgtcgagatgatgcgctgtttgtgcttccggctcttgaagtgcgggtccgggaagcagaagaagagcttcgacagctggcccttggcaaagaagttggtgagaaacttcatggcgttgccgcggatcactgacgcgttctggtacgagtccggcttgaggagccggagggcggcaatccggtcgcggacgaaggccgtgacctgatggcggatctccatgccgaggacgaccttggtcggaaagagctcggcgagcgcgatcgtcaggccgccaaagccgcagccaatgtcggcaaactcaacctgctcgatcccggacggcgtcgagccgaggccgggggcggcgggcgaattgaagaaggctgggtagtaggcgtgccagtccatcgtcgcaggacatgaggggctgagagggaacgagaggtcagctttcaggcttcggcagcatgtcgtcgacggcagaaggaagggacgggacgaacgcactagtcgaagccgtggtcggcgagcgggttcgcgtgcgcgcgctggcggtaaaacttcttctactcgacggaagaataggactccaggtcagctacaggaacgccttggctgcgagcacgaggagcaaaggacggacctgcggaagcttgatgatggacccgtcgggcgcgactgcctcggtcggctcgcgctcgtcgtcgacaaactcgtcgtccaacccggcgccagcgccaggcttgccgtcgtcggccacgccggcctccttgatgtttcgcttacgcttcgcggccatagagggcgatggaggttggagagggagaagacgaacgggctggcttcgacctgaaaaagccgacgggcgacagtttcagactccgcctgcgcccggtcgacgcgtccatgcaatgcgtacgagtggcgaccgagggtcgagggttgcaagacccaacatggcataacgctagcgtgcagacgagtgacaggaggtacgagagcagaggacatttctagaagagcgtgacagcaggttagcgcaggcggggaggtgcggaagaaacggcgacgcgcgagacgagtaacgagtgacgagcgaccgcagaacgccctccttcccctgtgcaactcggcacacgactcttgagagacgcacgtgacgagcgtagattcctcagttcgaggacgcgcagatcaaagagccacagcagccgtcgcccggaagcgcttcaagcggcggagcgaagctgaaccgagcgacctgacatcgcacgcttcgaggagcagcagttgaactcatgctgaggacagacaaggtcagaggaccgtcatgcagtctttgaggcgaggagcgttgctttgagctggtcgtaaactgcgcttgctgtcggccagcaggcaccgggcaagcgacatcagccgcggatcagctcgcttgctgatggcgtcgctggtcgagactgtcacggggaacctgctggctggcagtggtacgtgcgtcgcttggccggatgatatcggggcttcagagaggacgacctcaaagcagagcgtgggtcaaggcaggtcagcagtggtggccggaagagttctccccgcgcgcgctctgcatttgcagtgtcagcagtcgactcggccgcgtcgtccagcgcaggacctccgtctgtaactcagtcggcctggtgccgactatgagctccagtgccttgcgtgcgacgtcagctgtggtcgtgaagccgtcgggcgaggcggcgacgaggttaccgtcggcgggtcgagctcagccggcgccgaagccgcaccttgcccggctcacccgagcagtcatgccgagcgcgcctcgcctctcgttccttcctgccacggctcaatgaggcctaccctccgtctcggcctacgctcatgtgcttgcgagctaacggaagcctgcttgcgctgacaagtcccgagagacccgtgctcggctttggcagcagcccggcttgacgggggccgtactcgcatcgccaggtcgcccttcgccccatgaaggacgctttaccggcccatgaatgctttgggcgtcgcgaacggtccagccgctgcttagaccaaagggcggtctaggccttgcccttccacgcccggccgaggaggcttgccaggacggtctcgtcgggttgggggtcgatcgcgcgcgtcgacctcgtcccttccgccttctgaccccgtccgtggcgttgccacgagttgttgagcgagcaacacctcccaagcccgcctcgactgtgagcacccctctttccgagcgagcaacagcatttcttcgcgccccttgttcgctcgagctgtgagctgtggccgaccggccgggatagtttgcgagagggggcgggctgagctgctcaaaaggcggtcgcagatcggaggcccttctcttctcgccaacgaccttctcctcttttcaatccgcgtacgtagcaagcagtcgtccgacgcggttctcgcactgacgctgtccttctgtccttgcttctcagcactcggtcaagcatgctcggccttcaaggcgccgccctcctcaccgcgctcggcagcatcctccttctcccttcttcgctcgcccagacgactgccgcccgtccagcgagctgcctggcgacctcgctcgagtgcccggccgagctgcctttcacctcgtcctttgcgccctggggctgttcgtcttttcgaggcccccttcgtcctcgtcctttagagttgagactgaccgacccgattggctcccttccaggcccctcgggcgggattccaaacggcgccgtctggacgccctttacgacgatcgaagagtgcacgcacaagtgctctggcaccaaatggatgatggtcggtgcgtcctctcctctcgcttctgctgctgtccttcatcccgcttgctgcttgacgagtcggcgaggctgacacctcgtggccgtcctcgtccgtttgcgtaccggtcgcagaccccttggacactgcctacggctgctcgtgctggcctgagcagagcgttcccgacggcatgaactggtcaaagtgcaaggccggcggcgccgggacctacattaacctccacacgcacgaccctgtcaacacgtgcgcggccgactcaatgtggaactgcccgccgtcgatcggaaccgagagtgcgtccgctgtcgccgtcgctgttgagctactgctgttgtcaacgagcaccctgactgaccggcggccttgctcctccttccctttgcgtgtctctgtggcaggccagggcttcgagccgctcggctgctacggcggcggcgtcggcggcacgacgtccagcaacattgccagcctcgctgcctgcgccgcactctgtgcgtcaactgcgactgagtaagtcgactgggccgctgagggaatcgggccgacagtcactgacgcctggcttgctctcgcgcctctcctccagcctgatctaccgcgccgacgcccggtcatgcgaatgcgtgcgtcctcgcgacacactcgacctttgagggcgacgagctgctgacgacgaccgccctgtctttcgactctagatccccgccggccgcgctaactggggggcgacgacgtgtgcggccggcaggaacgtctaccggcagtcggccgcaccgcacccggcgaccgtgccggcgtcgtcgggcccgacctcgatcgcgtctgcgccggcggcaagccagacgccgacccgtccagcgagctgctattccaagttcggcccgtgcccggccgagctgtcgttcacctcgacctttgcgccctggggctgtgagtcttttcccagccctcggcctcttttcctggttcttggcctctcttcccgtgccgagctcgaccctgggctgacgcttgcctcactcactcgctcaggcccgacgagtggacacctcgtcgatgtggtgcgctcaccgtttacgacaatcgagaagtgcacgcaagactgctcgaccttcgggtggatgatgcttggtgcggccaactcgctctggcatgcaggccgtcgactcgtacggcaacctcggctgacagacgatcatcactggctccctctcctctcttcctgcagagccttcggactcgactggcggctgccgctgctgggccaacccgggctacatgctgaacgcctggcagtgggggaccacgtgcaacgagggcggcgccggcacctacattaacctccagatcagcgccccgccgccggcctcgacatcggtatcgtcctcggcctctgcctcgcagccttcggaagtcgcctcagcaagccccgaaacgtctgtttcagcctcgagcccggcctcagcctccgcttcagcctcggatgtcgctccgatgcctgtcgccacgtttgtcatgccggcctgctcgactttcggccagggctcctgccctccaaagcttgccgacccgcgctttgctcctgttggctgcttcggaacggacgccgtcggtgagtcttgcgccctttcgctgccggactagacaagatttggcgcacagcagctgacgattttcgctcctactcaagccttcaaattcgcgacgctggctgccggcacggatctcggtgactacctcaacagggaagcctgtgcagcattctgcgccaagtcgccttacgcggtttacgtcgaacagccagtcgccactcagagctcgtgctcgtgcttccctgactcgcctctgctggcatctgcgccgctcgtctcgtgctcgctcgcgatccagcgccgagccgcgatcaacgtggtcgagctccttagcaacccttcggccgtcgccgtcgcccctccgaccgcttcgcaggcggtcaagacgcgcaagcggcgcgagaagcagtcggccgaggagcacatccagcagcaccacgcgtactgccccgaaggcctaacgccctgcaacgacccgaccggcgacggttacgactgcctcgatgtcgcgaacgagctcgcgagctgcggtggctgcctctatggccgatttgacggcctcgttgagcccaaaggcgaagagtgcgtctctcttcgcctttcttttcgtaagctccagcaggtagcgactgacccgccctcgacacatccctctcttcctacagctgcactatcatacccggcgctccagacacggccgtcgagtgcgccaattcgcgatgtgtcgcccacgtctgccaggccggctggctgctttctgacggccgatgcaaccgggcccagcgcagctttcgctcctggaagtaacgttccgcatgcatgctgccatccctctccttcactcccaattcattcccttctttcgcttttccactcgttctttctccattgggccaggttctgctatgaattgctgctgcttcaaacaccgccggttgtagtcaagagtagaggaccccaataacagacgctttcgcagactgggtgctatactggcagagtatagcttagcgtgtgcagcgcagcggctctgcccttgccgtcttgcagaggagtcatacaagattcgacggagagcaagagacggagagcaaggccgcttacgtggcatcccgtccccttattcctcgccccggaaggcatcggcgttctggacgatggtcgcgatccacctttggatgccgaggtggccatcgatcgaggcgcgctcatcgaccgtgtgagcattgccgccgccgtggccgggctcgcccttaaagcggaagatcgacttagacagattgtgcatggcctctgcgaagaggaagcaagagggaggattagcgagccttttgaagcgggcggtgagtcgtgacgacggactggtgtcggtgttgccggtcgaggcgtacggcgtgacgatgcgctcagcgccgtcctcggtcgggaaggcggccctgcagaagaaaagtcagaattgtgtcagccctccactgagagcaaagcaatcagagcggtgccgcacttgatgctgccactgaagaggtcccagacgtcgcctgaagtccggctccgaggcgcaggctccagcggcgtgccgagcgtctcgagcgagatgtacgtgctgccgaggtcgctctcggtgccgtcaaaggcgtgcaggtcgagcttgaacttcttcgcgatcggctggatcgtctcgacaaggtgcgctttggttgcgttaatcgaggagctgaactggatgcggtggttctagaaagagacaagactagtcaggcgagcagcaacgagttgacaaccgctcaggatgggacggaccatgagcatgtcgactgactcgggcagcgagttcaccttgctgccgccgtggatgacatcgaccgcctgcgtcgtcgtcacgagggctgagaggggatgacgccgcgagcggatcagtcgagccacagagaaagtgaagacagcgaccagtcgcaccgtgctccatcgggccaagggaagcaaactcgtcggcaaggtcgagccagcccttgccacccttgtcgagcagcttgctccattctttcggaaaatcgggcgcgtgctcggccgcgcaggcgaggtaggcgatgagcggatcgtcggcctcaaagtcactctcgtaggggttgttgtgtagcgcgacgacgagctcgctcatgatgccaatggccgagatgccgtatttgttgttgacgaatgggacggaggagtggccgcccttggtcgcgacgcggacgcgaacgtcaaagtaacccttctcggaggacgacggcgcggctatctctataccgaaccccttagcgaaggtcgtgccttcatctgtaagtgaagagcgtcaggccagctcgggcagctaagattatggctagcagagaatacccaccaatgacgagcagcatgctgtcgcggccgtagcgctcctcgaggaactttgcgatctcgacagcaccctgctgcgaatggacctcctcctcagcgaatccgtgcgagagaatgatcgttcggcgcggcgtccagtctggggtttcgagcaggagtgagagcgccgcgtactggctgacgagcagcgtcttgtcgtccgacgcgccccggccccagacgtagtcgtcatcgacatgaccttcgaagggcgggtgcgtccatcggtcgtacgtctcgggcggagcgggcgtgacgtccgtgtgcgacatgagcagaagcggcttgagcgacgggtttgagccctcgatcgtcacgaggaggccgagcgagttgacgtgctcgaccgtcgtccgcgggtgctggaagacggtcgggaacgaccgctggagccaggcatcaaagacgaagaagggcgcccagcggacgtcctctagcggcttgcctccgtcgtcgtacgaaatcgtcgcgatttgctggaagtagacacgcatcgctggtcagaggaggatcgaaacagagaggaagcgatggagccgagagagtggacgtacgacggcctccgacagcagctgagcagcggcatctcggtagcccttgtcgaagctgaatgtcctagccggcttcagcgctttggcctgcttcgggcatcgaggcgctttaaacactggaaggactgccgagggcgactggtgacgagcaagatcgtgcagaggcggccgggctgtcgacgtcatgggcgagtgaagcaggaagaggaccgggacggcgaggagtagaagcagcggcgctttggaccgtgactgagcgggagaaccgccgtcatggaggggtaactgaggcatcgtgggctgaatggaggacgtggttggaggaagagtcgacagcgaccgttccgaccgttccctccgagcgagatgcggcgatctccgaaggcccgcgaactcgcatctgcactttagacgggacgcctcattctgcgggcgtgtacggcagctgcaattgaggtcgcgcgcctctcctccaaggccgagcgtccatcgggtagccggccaggcgagcgcagggccgatctgtcttggtgtttgacaagcgacagggagagcagaggcggaccgggtgaagaagagaggatcaagagtcgaagctactgccggaacgcgccgtcgtctcgacccgactgacgaccacgaccagcttctgtgccctcccgtcctctcagcaacctctcctacacatttgagacgacggtaggccatggtctcgacattgcagacgccggtcgccgttcctcttgaagacgaccacgatagcgccgaccacccggacttcgcgctccctacgcagtggccaaagcgcgcgtctcgggcttcggctcagccggcagttggtcctctagcagcgcaggctcgtcttcggacgaggacggcggagacactgctggcggccgctcactcaagcgggccaggggttcggcgctcgagacgcgctcgggccacgtctacggcagcgaggcgggaccgtcggcggtcgcgccgctctcaacgaacggcggcggcgaggctgaccggccgcccatgatgctcgctcagctccagtcgctcgaccgcgaacggacgtgggccatgctcgcagatggtactagtactccttacaccgagcagatgatgatggtgcgggtcgagcactggttcgcaggcaaggacatctagtccgtgcacccgcgtccttgcctgtcggcgctttcatcatatcgctgacgccgaatctcacgccggattcacaggttggcgaagagcgtgctggcgtccagtaatgaggcccgaatctagtgcaagccggaggctgcgacttcactcgacggcatcgacgaggatcggtcgctgctgcgcacggacgtcgacctcagcaccggaggcgagctgtcgccttctcccggagcagaaggagccaatggagacggtctcgacgttctccggacgttcccatctctccggcagtcagcgcaggtgacatcgccacctcccatcggcagcctcgactcgtcgtctgcagccgcgaccgtgctcgatcagccggcaccgtccactctcgttccgccgccaccgggcgctcctgccgcacgtctaccgccgctctaaaagcgcaaaggtggtggtctggcagcggcggcgcttgcggccgagaacgaaggcaagaagatgtcgacggttgaacaagtgcggcgcgtcccttgccgagacccaactcatgccctgaccgtcaaatcgcccctctccctccaaaatctgccattgcttcaaggagccaccgtgcagaagagctcacggagggagagcgcgatcagcttgcccgcaaccggcaggcagtttcttcgagaagcagaagttcctcgaccgagtccaggagcgccgcggcatctgattggctcccatccatccgccaacccttcggtctagcgtcccgtcagctcccggcttcttgcccctgttatgccatcatgccaacctgcattgcttttgctgctttgcggcgggtgagcggcggggtggcgcgacgggagacgttgggcgactgtccggcgggccagcatacgctgacacatactgactcatcgccagccccaagacaagacatccgctctgctctttgggaacggtcgtccctcgacttacagcaggcgcaagggagatcgatttgtgcggtgactgtcgacctctggcggtcgcgcccgtacgccgcactcgaccaaacaaagtcgctcgcgggacttcggttctcatgcctcctcccgacgacaacttcgcccgcttgtctcgaggccgcctaggctgacgagctcagactctcggctgtgcagctgagcaagcatggtgactcacggacacagactaatcagtatggttccggggccctcggccagtcggaactgaccgaccgaccgatcgcgcttgcctctctctctgttcggcgcgaccgccgcccgcccaaacagcacctcgctcctgatcgtctcgcagatcgagaagcagcggtcgggcatgcactaggagccccccaagccctgatcaaaagcaatagattccccatgagtgtgaacgacgcagtgcaccgagtcgtcctctagctcgagaggtggagaggtccggaccggaaggagagggaggctcgttgcgagctgtggggcgaaggcgcaattggataagagagggcggcgggaccagcgagcgaacagggtgggtcaaaagaccaagagcaggggggttgcaaaagaggccagagacgaagaaagggtctaagctctggagggcgagacgaaatcgattagggaggggacgaggatgggcggcggggtaaaggggagaaggggggttaatgacggctttagaaggcacgctggtccgcccctcgtctaccgtccgcctcgcgcctgctgctgctgctgctgcgaaagaggagggagacctccagcgcgctcgaaggaccggacgagcgccccgacgtctggcggagagcggtcgaatgagctccgcggtctgaggacggttggctgagcgcgctcttgggagcacgagtgcgagcgggagagggcggagtgggcgctgctgctgctgtgggcgcttgagaaggacgttgagaaattggccgctgcggaggacgacgacgacggcagaggaagggggcgggggatggcgatcgggcggctagcgacagcgatagaggctgagcgggaagggccgccggcaaaggccgatgcgtgcagcactgagcggccggacgatgagagtcggccagcagctggcgccggtcgagcgacgtgccggcggctgacagaggaggagcctgccggacgggcatacgaccgccgaggcgaggctgacgacgagggcgggatgacctctggcgtccctggccgagcaagagccgggggcgccatgtccaactcggggatgctcgcccgcgtccggagcgcgccggcgctcgtcggtagcgagtcgcgcttccagacgttgaggaacgagaggacgcggtcggttaatgagcgcgctgccgtcgtcgttggccgcttcgatgccgagccagccgaagtaggaaggaccttggtcgactgggagaaggcagcggccggtgagcgccgacggccaggcgagcgtgagagggtcgcgctggccgctttgtacggctcgagcagggccgagtgtgggttgtgcgaccgccgacgcttgctcgcgcggacggcctcgttcgaccggcgctgctggatcgatgctaaccggagggcgagctttggcctgcaaggaagcaagggaagagacgtcagtccaagttgagtcttgtcggccagatcgatcagcaggggacgcacctcgaccagtcgccctcaagatcgtgctcgtcgacaccagagcgaagcatgaaacgctcgatggcggcgtcaaagctcgcagacgggccggcagcatcgagcgactccatgagcgcccgccactcggccggtctccagggccgatcgacgacgacctgccggacggtgacggcgggccgcggtcgctccatgaagagcgtcggtccggcgcgcgtgaagctaccggggatcacgagcttagggttgtcgtcctcgtcgctcgacatgtcagcatcggctgcgggagccgcctccgccgcctcgagggcgatctcctgctcggcctccatcaggaggtcgtctgcgacggagcacatcgacatgtcgccgaagaaggccgaccggccgtgcgagacgttgagcgacgataggcgcgaggcggtcgagcggtcgcgcgcagacgacgctgacgagacgtctgggtcggcatcggcctcgatatagtcgtgaaactgtcggagcaagagcgagcaagcgcttcagcacggcaagggccaactaggaggttggacagacgggacgcaccaacttgaggaaggcagtcgcacgcgcggcttgacgcgggtcgttagacgagaccttcacccaaggcccagcgtcgtctgtcatgctgaagctcgcgtttccggccggcgagcgcgaggtcgtcgcaggtgcggctgacggaattgtgcgcgcagcgatcggtgcctcgagcgacggggaacgcactcggatcggtgacggcgagggcgtcctttgacggattgtcggggaggccggcggaatctctacctcgtcctcagccgagaacgtatgctcgacgtcattgagttcgaccgacatgtcagccggcagagtctcgatagggcttgccgacctgctgggcgactccgtgatcgaagcagccgaccctgacgacagctcggcggtaacgacatcgacgggcggctcgacgtccgtcgacgactcgttgatgatgtcctccttgttggcctcaatggttgacattggttccttgctggcaaattggcccgtctcggtgtagagctgaacctccttgtcgaatttgcggtcggcctcggtcagaggcagatcctcggcagccggcggctcgatcgtggctggctcgacctcgaggggggtagaggtcacgctgacctcctcttcgaactcaaggtctgtggaaggagggctttgaggctcgacggtgacagcgggttcgatagcggcaatcgacccgtcgatctcgtcgtcgagcgactcgaccacggtggcgcctccgttgtcctgctcgtcgggctcgtcgatcgcgttgacaaacgcgcggaattcggcgagctggtccgtctggtggtcgaaagcgccggccgtgacgtcgagcacatcggacgcgtctggcggctcgtcgtcgtcgtccgccatcttctcgagaagagacttttgctcaatctcgccgaagaacgagtcgccgtcatcgtcgctgccgttaccggttccttcgtggtcggtagcggcgtgcgtccagtccgagtcgccggccgtcgagccgccgccgttaagctcctcctcttcagtgtcgtgctcaaagggaggagcctgagcagtgtcctccttggggcgaaggtcgaccgtatcctgctgcggagctaggggctcgtgctcgtccttgtcggacggctcgggggtcgtctcaacctgactggactcgagccgagactccaaggcctcgggctcaggctcgcagtcaaggactccgagctcagtcggcgaggcctccggcgagtcgtcgccgaacgtctctggcccaacatcctctgtgacgacgcaatcgtcgttgagcgtgccgagtgtgaccgactcgagctcgaccggctcgaagtcgctctccttgacctcgacctcgacctcgaccgagactgcgacgaccgattttggctcggccaaggtcgattcgtcctgctccggctcgtcctcgtcgtccgtgctgtctgggctgagggagctcctgacttgagcggcccagcccgatgcatcgagcgaccgatcgcgggtttcccactgcctgtcgaactcgtcgagaacgctgtcttcgctgccaggagcttgggccgtaagcgtgttgtcgccgtcgtcggcgggcacgagcgagtgccgggcctgcgactcctcgtccggctcgctgccagagtacgattcgggcgtccgaggcgggccgaagacgtacggcgacagagcgggcgcaggggtgtaggccggctcgagcgactgcgagggagtagtcgctgacgaggtcgtgacggtgcgctgcgacatgggcgtctcggagacgatcggctgagccaacgtcgaccgtggcggggagtcctcaaccggcgcctcgaagacacggatgaccgctggctctggtgtggcagcttgaacctcggcgagtggcggcatgtcgacgacgcgaacgggagcgatgggtgaccgggcgggagaggccgacagtggcgcagacgccggggcgacggtcggcgtcgtcgaaggcgagccagcagaggcgagagggacgaccggagtgagtgccaccggagcgcgaacctcgagttgtcgaggagtgctcgcgattttaagcgtgtgtattgacggaggcgagaggccgaaggtcaattgtgatgagccttcggccgaagccctcggcgacacctcgagtcggctgtgagaggcctcgcgcgagaaggaagactgttgctcggcggccgatggcgaacgcagccggggagccggcgatgaggacggcggggtcggcgttgccgagacggatcgaggtctcgttgacggcgacaccagcggctgctggcgagagacagctagcggcggcgtcggagctcgtggcggcgcctcctgtggcgtcgttcctcgcgacgagggcgagacgagagcaacaggtgcgggggctgcccgcagtgcaagaagcgagtcgaggtcggacaggcgaagcccctggcgagcgcccgacgactttgagtgcaagtagaaggtgttgtctgggtcgtcatcgccgtcttcgtcgtcattgtgatcgctgcccgaggaagggccgaagttgccgacgtcaaagccgccgccgtccatcccgccgtcagcccagtagtcgtcgtcggcacggtcgatctcccggtcgctcgactggtccagactggcaagtcgtggcggctgcgaaatcgcctcctgaggcactggactggaggccgagagcccgagttcgtcgtcctgctcggcgtcctgccgagcctgcacctcgcgtgcggcgtcggcgcccggcgagggggccaagaaacgaattcgctcggcgcctcttagcaggatagggtcatcgctcggactcggcggaggcgagggcatgttgggatcggtcgccgtccggacaatcggcacgcccttgggcaagctcgtcggtgccgaccttcgtcgctgggcagccgccgacttggtcgactgtgacagggccgactttttggccggccgctcagtccttggtcccgtcctggctccggttatcggacggcttgatggcccagcaccaggggtcgagaaggtaaagcagttgtcgttgagcgacttgctcggcggcgcagcggccgacgcgcgcgcctgcttgcgtgccttagggttcgggctcgcgttggcctcggcgccgggccctttgttcggcgagttgagcattgacggcgtccgtttgcgggcgcgaacgagcgagctcttcagcggcgactgaggcgcgtgcgagaaggctcgacgggctggcgcgctggccggcggggaagactgcttcggccgggaccgctcgcgggcctgtcgaggagcacacaaaggaggcgatgagatcagtcgaacgtcgccagcttataagtctagatagagactcacgccgaccatggccgcgtaggcatactcctcgccggcctcgtcagagccgacgaagccagagtcgcgcgccttcttcctcagagacgcgacaacgacaggcgccgcctcgaacgactcctggctattgggtggagtgagcaggctcggataggcctggccgggtgacgtactcgtgcggccctcggaggccgccgctaccgaggatgggaagctgaggcggtcgacgagcgagatccgggcggcgtagcgcgggggcgcgagcagcgggcgggtgctgaggagcgagtcgagcgtgtcgtcatcgtcatcgtcggattgcggcagattgaacgtgcttgcagcaagagaggaactctgacggggccggacagcctgcttctgctggtcgaggggaacgtcatgctcgtgagtgagctgcgggtcgatgacggagggaggaggtcgacccgccacgcaccgttgggccggctgacttgcggacagacttcttcagccgcttcgccctcttggctggaacagggatgctggatgccggcagggagctgacctcatcggccgtggctgtcgtggacgacactgcaaggcgagacgagctcccgttggccgacgacgacgtcgagcggcgggcagcggccgggcccttgcccttgccagcaaccggcagaggcgaagcgaacgctcgaggcggattgacctcgcgaggcatccagcttgctgaggggtgtcaaggggacccggaagaatggaagggaaggcagaggagggaaggagtcgaaggttaaggtcggcgggcaggtcaacaacgcgtcgtgctcgagggcgggcgcgagagcaggcgcgttgcccgaggttttgcctccgacctcctgactgctcgaaacgaaaggaggagcgcagagtcgtgcaatagctgagggaggagatcgttcggtaggtacgtaaaggggaaggcgaagaagggcagagtccgtgtgaggtgagtagggggtcgttaaaggagaagaggggagagagctcggctgctgtgaggcagctcctggacgtcgctcgaggagcaggcagagacgatgcttgggcagatgatggctgaggatggtcctttcctactgtgcagggtctgatggtgcctgggcgagcaaccgaggatgcggccggagatggtcggttgagtctcagagcgccgccgcacgccggagaacgccccaaccgctgacgaggatggcgagcatcgtgaagagcgccatgaaaaagacgggcgacttgagcgtctcgctcgccgatgagcagctggcgcacgtccaggctgcggaagagcgacaaggatacgtcagccaacacccaagccgtcgcccagcaaacgaggtcgaggggactgacagctaagaggcgtgtaagcctggggccggtagagcgcaaacttgatgtcccggttgaccgtcatccttccaccggtcggcgttgccgtgggcccgcgctcgtcccagatcgtcgccgtgtacgaggtgacggcccagggcagtgagtacgtctgctcgacgtcgtacggcgaccagacgagctcggtcgccgtgccgggaacgacggcgatcggatatgtgttgcccgtgtcagccgaggcgatgatggtcaacgactggggctgcatctgaagggagcgaagtggaaaagacacggaggtcagctctccaggtacaccggcttgttcgcgcgctggcgcccctctgccggcccttcgtgagacgaacccagagcgaggtgaaattccagccgaaagtgacaaagttgtcctgggcaatcttgtagtacgtctcgcccgcggcccgagcggggttctgaggcgaggcggggagaggcaaggtcagctctcgctcaacccaagcgagcccggaagcctcgcgagctcgccaagtggacggaccgtgatcgtcagaccgccctcggccgccgtctggggactgaacgaggcgagcataaggttgtcagcttttctccgctctctgcactaaccaggagggcatgggaaaagctcgcacatcatgatcgagctcgtcccgggtgtggaacgcgtcgccgaggccgaggcggttgccgaaacagtcgctgacgacgtcgacattaggacagacagaaagagctgagtcgaccggagacggagagagagaagcgaggtcgagcgagaggtcggcgaacggcggcttgtgttggcgagggtggtggaaggcagagggggccaggagaggaggaggaccaagggctctctcggcatcggcggcgcggcgccctgctgtcacccggtcggtcagccagcctcgacgacttgcccatcgttggttcttcacccggagagtgggcagggctgtgtgtagggcagagagactcctctcgctcataattttgttctccggaagtctgcaggtgtgtcgagggaggaaccaagggcgggtccgtctccctcgctcgtgacggctgcgcgccgcaagccccttccgacagagcagcacctcgctcgctctcagccctccctcctcctcctccttgtccattctccgccttcccctgcgcaagccagaatgtcgctcacgccgatcctcccatgcggcgtgctcgtcggcgacagtagtgcgggcctccagcggctctgtctcgtgtccagcgcatgtgagctgaccctccgacgagatggcctcaaccttccgacccagtcacgcagaactcctacgagaacgccgagggcctcgcgacccggctctcacgtgagctcgctctcctcttgtcaaatcgacgagcgctgattaacatcctgtcctcgtcaggcgagtacatccgccggctcgacgtgattaaccggtgcgaccccctacgagccggtcgtcgtgctgcgctcctccgtctgagctaaccgacgcctggccactccctttgacagaggttactcgggctacacctcgcgtgatatcctcccgatcgcgaaggagctcttccggcccccgtccgagggtgcgcaaggccaccagcggatcgtcttcatcacgctcttcctcggcgcgaacgacgcaaccctctttggcgcccagcacgttccgctcgccgagttttcgtccaaaattggccagatcctcgacctgctgccggctcaagtgccaaaactgctcatcaccccgcccatcccgcagggtgaggtctgggccgcgtcaaagggcatcgaggggctcgagccgaaccggagcgaggccaacacggcgcggtacgccgaggcctgcagggaggtcgcgcgggagcggatttcgagtggggtcgagcttgtcgacctttggcaggtctgtccactctccgtctctctatgagcgtgctagagaggtgggacaagacggctgacgaatgacctttttgtgcgactttgcggctttcgtcttgatcaccgtcctctcatccgctcactgcctgtgatcaggcgatggacgagtaccgctcggtagagggccagcagctgggcgacctcctgtccgacggccttcacctctctgagcgtgtgcgtctttcgttttttgccttcgttccgcgggattggtgcgtgacagcgctgacagatgattgtcattctccctcccgcccatcacgccggtctcccgattgaagggctacaagctcctctctgaccgcgtactggagcacctccaacacgagtcggccgtcgaactcaagcctgaggggacatactaggcggcccgaggggagagcagccgcttcagaaggcggtgccgtagatggacgattgaaaacctacacttctagacctgctctcgaccatccctgtggcaaagctgcatcgtctcgacagcccgtaacagtctgcatcgtctccgtcgtctccgtcatctccatcgcgtcgtcgacatgtgcccgggcccgccccttcctgatttcctcgctgccgcgcgcctcgatcgcctatcgccgccgctcggtcaacaacgcaacgcgctgccgacgacgacgacgacagctcgaccctcaacgacgaccgacgcctcctccctctttcttccgccatcctctcttgcgcgcgccacccctctctccttccccctctctcggccagcgatggcccgccgcgtccgctctggctcgacctcgtcgacggcgtccaacctctcgtctccggccgactcgtgctgctcgacttcgtcgtctgacagcgacagcatcccgacccgcgtccaatgggggccgcagcggacgcccgagaagaactggctccggcgtgtgcgcaagaaggactcgcgcgagtttgtccggaggcagagcctcggctgggatcgctcgctccgggaccggctcgagtcggacgacgacgaggacgacgcgtcgtccgctgcgggcagcagcgctggcgagggctcaggcggccctctgcgatcccgccggccgagttccgacgacaacggcaatgcaggaggccgcagcgacgacgatgccgggccggtcgctgtcggcgagcctgccttgctcgggagctcagtcacgacccgtcgcgcgtcgcgtccgtcgcctgcgctatcgggcagcgtgctgcgagacagcgacgtcgacagcaccgactcggacgacgagcctgcgaaagagctgccgtcagacgacgtcgatgtggcgtcgccgcttccggctcagctcgtcaagacggagcccctgaaggaagggatgccggaggccgctcctccagctgccgcgacgccggcacgacccacttcccgtcgaacgacttggtcgcccgctctgccgacgtctcccgttcaggccgcaacggccaccctgccatcaccgcgcgtagcccgggtcaagaaggagcccgctgagcccctcgatacgatcccgttcgaggcgccggttccggcgacgctatcgtctctgccgacactcgcgtgccgagatttgcttacctcactcgagccggtggcggcggacgagtcgacttcgacgacggctagggccctcccgccctcatcagagacgggcgagacgccaggctcgcccgggcgaagtcccggtcggcccgagcagctgcccagcaatcaaggcgtgtctgcatccgcgccggacgcgcttggaccagatgcatctgagtcggaagcgactcgaccggtcgctgggcctcctctagagttatcgtcccttgtccagcgtgccgaggtcgcagaggcagggcagaccacggttcgggaggccgaggttgtagaggagccaacacaagactcaacgctcccggacgaggtcgacctgccagccaacctggtcgaagtcgagcgggccgaccttctgaatatctgcggcgagacaaacttagaaccgaaactcgccgacaagcagcagagccctgttgccttgcacgactctgtcgcccagcgtgagccccttcatgcttatgcccaactggcagggcatgcacgctgacgctcctccaaccttctcgcgcagacctctcacaaacgatcaagaccaaggctgaagatgtggaggtcccgctcgcgaccaccatcaatgacactgagatcggtgcgtctcccggtcgcgtcgttgttgaccgacttcagccgcctgaactgaccgcctcacgttcggcagatgtggttctggccgacgtctcgaccgtttctgcgacagaggtgatcgtagacgaggcgccgccaccgctcgagtcagcgtcacaagcggacccggatggtacgaccagcccgacagttctcgacatcgcatccttgactgatctcctcctgactcaatctcagcgacagcaaacttcccgctggacgggatcatagtcgcctcggatgagcagtcgtgcccggaggcctcagactcggacgaaacgagcacgaccagcgttgcagacgtgccacatgctcagcaggatgtgccggcagcaactgagtctgacgcacaagatttcgccttggccgcgcctgcttcgcagcctagcgaggcgcttgttgtcgacgatcaggcggtttgcgacgaggagctcatcgtcgctgagacgctcgacctcgaggttgtcaatgaagacccggccgcttctgacttgctcttagagcgacccgctgtcgccagtctcgtcgatacagagcccgatctggaaatcgaagcaacagctgccgacgttgcggctcaagaagcccccgctgaggctgtcctctcaccggccctttacgctgtcgtcaacgacgactccgtctcggcggcggcggacgcttctccctcaccggatcccgaagcggctcccgctgcgcccacgctcgagacggactcgactgctcctaaaccttcctctgacgccgtactatccgaagaatcagacgcaattctcgaggagcggagaatggcggcctcgccgccagtgctcgcaacggagcggataccctctccgccaccgggggtcgaccagccagtcagccccgaggcggacgaggcgtctcctgcgcctgaagccgaaaaggccgaagcgcccccggaccaagtcgcgcctgtgctcgctctgtcgcccgtcaagcccaccgccaccagcgagacggcatttgaggcagaccatgaaacagagtcggtcgcgcccgtcgtcttggcttctacgcctttgcgaacggcaagttttgccccgacggtccttccgccagcaactcctccagtccttccttcagcagtcgagacgagccagccgtcgactagcaacggccgtctgggtaagcgcccatttgatctttcttactactcgatccgacgtggctgaccgccctcgcggctcccttcgctccagctcatgctcgcggcgactcgccccgttcagattctgtgtcgtcggccctctcgactccgccaatcaaccgcaaatctatccgtttgccgccggccgagcatgcccccatcgtccgctcaatccgctcgcgcatcgccaaggccacggtggctgctccatcagcttcgttgtcgactggaacacgcctcgcgcgcccctcgccagcgctggtcgtcgacttgccagcgcctcttgttgccgagcctagcagacggtcgcctgtcaatcacacggccagaacgacagtgacctccagcagcttgccatcgccgcctgcccggccagctcgagcggcgcggatcccgccgccttcgtcctcgagactgcgagcagacgcaccgccgccgccgccgccaccgccatcagccgctcctgccgtacgacgcccgctcagaccgacagtcgccgcccagctgccagccatttcctccgctgccgacacctcttctgcgccgcccactgctgcggtcaagcgtagggcgccgacgccgtcgtcggtcggcatcacgcctgctgcccgcgcgcctcgctcaagaaagcctccagcggctgccgccgtcgtcgtcgaccagatgtcagacgtcaagctccagagcatgacgctcctcaacacgcgcaacaaccaagcctacttctcgccgctcgagagggtcgtcgtccgtaaggagggccagaaccgacccgagagtcccgggccaaaagtccgcaaggccgggagcggtcttttgcccaaggcgacgctcggcaagggccgggcgctctttgacgcgccgacaggcgaggacgaggacggatggtcggatgaggagcggccgccgacgcctaagcgacacgttcgtgggccgggcgacgtcgaggattacgagtcgccgatgcgagggccttcgaggtcggtcctcaagggcaaggcgaaggccagccttccggaccagcagcagcaggccactgcggccggctactcggtccgctggaaccggggactcgtcttgatccggccgaggaacagcacggcacccgagccgcagcacagatctcgaccgagaggcccaaagccagccatcaagccggtcccacctgtgcgttgagcgttctccttgcttctcgcttctctcttgatctcgaaactaaccttcctcctcccccttttcagctggacgcattcggcaacgtcgagccttcggtcccgctcgcgcaggtgctcaaacgctcgctcgtcacctacacaaagatcatctacgacgacgacctgccgccgccgcctgcagcggccgcgggaaagaagggtcgcaagtgatcctcgatcgtttctcgccttttcgtgggcctgctcggcaccttccttttctcccacgagcaatctctttttccaaccttcgatctttgcatccctctgccctctttttgaatgagcattcacctcttgtccaaaggcccgctccttgttctttcacgaccgagacgatgaccgataggcatgggcctcatcagagcacagagtcggcgggaggaaggatggagggtacaaaggggactggtgtctgttggcggcaacaaaggagggtgagcgagtgatgaaacacagagggtgaggggagggggagagggggcagtttgctctgataaggatttacaatggagaggccgagcggggcttgaccgactccttttcgtcgtcgtcgtcgacagcggcgtttagaggtcgcccttgacggccttcgacatcgactcggcaaagtacctgccgcacgagcaacacgtaatgaagagcaggggtcagcggactgagactcgggagggggcgaaaggcaaacgcactcgatgttgccgctgttgaggccggccatcgaaatgcggccgtcggccgtcatctgtcgtcgagcgagtgagtccgcacgtcagctgcggccatcacgaatggccaaagggaagggaggaaagacgcacgtagatgtgggccttctgggcgagcgcgaccgtctgcgccgtcgtcaggccggtaaaggagaacatgccgatctggcgctggatgtgcttccagtcgccgggcgtgttgtgcccgacgaggccggcataaagggcgtcgcgcatctcgataatccggtcggccatgcctgccgacgatgatggacgggaaggggatcagtaccacaggcggagaccacaggcggaggaaagttgggggaggcgaggaaccgacccttgacctcgccgagccactgcttgttgagtgcctcgtcgcccataatggtgctcgcgatccgcgcgccgtggaccggcgggttcgagtagagcggccggacgaggatcttgagctgcgaatcgacccgcttcttctcgtccgtgtccttgcagacgactgaaaaggcgccgacgcgctcgccgtagaggcccatgttcttggcgaaagactggcagaggacgacctggtggccctcctcaacaaagtgccggacggcaaacgcatcgtagtctgcgtcgcccgaggcaaagccctggtaggccatgtcaaagaagggcgcatgctccttctccttgatgaggttcgagagctccttccactgctcgtgcgtcgggtcgacgccggttgggttgtgcgcgcaggcgtggaggaggatgaccgagcccgacggggcggccgcaatgtcggccttcatgccggcaaagtcgaggccgaccgtcttcttgtcaaagtacgagtactgcttgacctcgaggccagagtcgcgcgagatgggactggaacagagaggagtgcaggatcaggtcagctttgtgcgactgcgactgcgagcgccgagcgagaggaccgacatgtggttaccccacgtcggcgtcggcaggtagattgccttcgcgccagggtagtgccgggcgaagaaggcggtaccgatccggagggcgccagtgccgctgatcgactgggtgacggcgagctgcagatgcgagaggggtcgcgcgtcagaacgggagttggcagcgagtgagaaaagagggacgcacgcggtcctcggcaatcggagcagacgacgggccgtacgcgagcttggcggcgagcttcgtgaagtcgctttttgagcgagggagatgaggacgtcagccagccgacactctgcaaagggcttgtagcgcaggtgaaagaggaaggcgatcaaacgcacccaagtccggtgatgggaaggtactccttgtcctgcttagcagccatgatgcgctcctcggccgcaaggaccgaggggaggacgtacggcttgccgttggcatcgcgctgcgtgcgaggaaggggagcagggagaggtcagcagggtggcacgggattcagccggtcgagcgtttccttccatcgccctccgccgagcacgcatagtatgacagagcgaggatcacgagtctgttgaccggacaccatctccagcccaccgctcatgatcggcaaacggagactcctctgcgtccctcacgcgctcgcgccaggagcgagctcgactgagctcccctctcacgcgttcgccatgctctccggccgagatcgaaagaaggaagagacggcgacgtacataagcgcctgttgatcgtgtccatcacgaggagaggtcagcagaccggtcaggacggacgagcggcggcggggtaaagcggagggacgagaagagcgcgcgcgcgctgtcgtcgtttcgggccgaagcccgccggccgtttgccgggcgctctcgcgaaagcaggagagagaggaaggaatgggactgaccgacgccgagattaattttgcgcgcgtccttgtcggccttccatgcctcgctgacacctacagcgatgaacgcacgcccgagaagaggcagatggaagagaatcgagagctcgagtcagcgccagcatgtgaacgcgcgcgcgcgcgaagggggacggaccgaggataggatcggccgggccagcctggacgttggcccaaatcgaggaggctgcgcctcggcggaggagggcgggcgcgctgctggcggggcgaaggagggtcgagcgaagcatgggtggcgaggaatgaggagggaggggtatgggttcggagggaagggaggacgagatgaggaggggctgaacgggcgggcgcgtagcgcggggcagtcggcccaaggcgccgagagtaacgtgcgtgactgtacgttacgactcttatcacctgagatgatctcctccattttcactctcgcgaccacctccttcccttgtcagggtcttgactcctgacgagctctgacttgcaatgcggggtcgtcggtgaggggcaaatgggtcgtcgcgggtccctatggcggcagcggggagctccaagcagctcgactgtcgccgccgccttggtccgacgccatccctctatatctctgacaaccaatctcctaccagaaggagcgcactcgctgcccggactctgtcttgtccctgcctgtcaaggcgccgaggcgtttggaatgacgggcctcgaagtcggtcaaattagaggtgggactgtgacgtgccccggctggctcgtccggcggttcggtcatctcgcactgatggattcccttggcggcccctcgagaagtcgatggatcgaagctctgcttgtcgacccttcacccaccacctactcggccagctagacgagcctgatccgtcgcccctcctcttcctgtctctaaacctgccagttagccagccccaatgcccgccaacaaagcgagcagcagcggctccagcgccgacgccagtgccgacgagcgacgcgagccgactgggacgctgagcatcgcagtgctcaagtgcgacaagtgagtcgctcgctcttccctgcccgtgttgacgggcactgtctggcgcgctgctccaggttgcctgtgggctggagggagacggaaatctaaaggagagcgtcggagtccagcggggagggctggatgctctcctcgccctcccgacccgactgcgcctgcctggccctgccttcttctccgtcatctcctctacccgtctgaagctcttgacgctgagatagaccggtgagaggttgaccgttactgacctgtcctctgctcacgcgcgcaggcttcacaaggacagccggccgaagcacggcacgtatgaggacgtcttgtgagcatcttcctgctcttgcctcggccgacggaggattatcgcagctcgaccactcccaggaagctgactgaccctgtcgtcgacatccttacctaggcacaacctcttcgagccgatcgtcgccgacgtcgcaccgcatttgacgctcaagacccaagcctacgacgtcgtcacggcccgcgagtacccgtccgaaaaggagctcgcctcggtcgacgccgtcctcatcactggcagcttcgaggacgacagcgtcgcggacgagacgtggatcctgcggctgtgcggcttcctcattcagctcaacgacagctttccgcggatccggatcgtcgtctgtccctcgatcccctctgcgctctgcgtcttcgcgcgcactgacccgcctcgcttcctcgcggcgcagggcatctgcttcggcctccaagtgctcgtccgggcgtttggtccctcgcgggtcgagaagaacaagaagggctgggaagttggctcgacgcgggtcgagctgaccgagatgggtcggacgctcgtctggggaacgaccggcgacgaggacccaaaagacctgccggacagcatggtgcgtttcaattcgtcctcttatcgtcgggccgacttgcagcatgccctaaccctcccgctgcgtctcccttccgcccaccacagtcgacgatgcagatccactcagacatctgcacctcgctcccttccgactttaccctcctcgcctcgtccgagctctcgccgatccagggcatcgctcacttctacgacgacgacaagcggccgccggcgtttgtccactcggacgagccgctcccgccggacccgtggcggcgggtccacatgatcggttcgtccggccgcaaactctcgtctcgagtgcatgccaggcgactgaccactgcacccttcatgcgccgactgccagccttccagggacaccccgaatgggtcgactcggtcgtcgtgcgcccgttttactcgctcgctagccctcgtgccttcgaacagcatctgacaccttgctcgcccccttctttcgcctgactctcggcccccgcaggtgcccttcatcaatgactacggtccgttttcttcctttcccatgtcaccgtcgacctctgcagaatgctgacccgtttgctcgcacttctctctcgacagagaaggacggcaccttcacgcccgaattcgcaaaggccgcgcgcgaacgggcgcggaagaagcacgacggtgtcgagctcggccgggcgttgctcaaggtgctcggtgtcgcaaagccaatcaagtgagggccagcagggtcagggctggaagggcgagcgagaggcgggtaggcccctcgtgtcgcgctgcatctatgggcgttacatggacattgcaagcccatcggtatcgactcagggggataaacgccacgtcgcccgacacaggccccgactccatctaaagcttcgccttgctgctggctccagccgccgaagccgcctcgcactcggcccgctccatcatgccccggacctcgacgcaagcccactcgaggcactgcttgtactcgcgcgccttctgggtcttgcgggcggtgatgacccagcggaggaaatggtcctggaagggagaggagtgtgtcagcgcgaggccgcagagagggggagactcggaagggggacgacgcactccgaccgaataggcaaggccgtagccgtcttcaacgactgcagcaggggagggaagagaggcgagatgtcagctcgctggccagcgtgttgaacagaactcggtcgacgcaccctcgccgtagccccagccgtcgaggtagtctgacagcaaactgctcgtgctcatctcccagtggctcgtccgggcgtaggccgggtcggtgaagatctcgggcttggtctcgccctcctcgaggagcatgcggaggccaaacaggtgccggtcgacgcccttgccgtcggcagcaagcgcggcgtacgtcaggtgccgggcgcacgcctggcggaagagctcgacgcgcttcgagtcctggagcggcgagagggagaggacacggtcaactctggacagctgctggctcagtcgtcgaccaagacgtaccgcgacagacgagtcaagcatactctcgatccagtccttggcctcctggcttgcgctccggatgacctctgtccggccgagcttgaacttgcgcgtctgggccgactcgtagcagacgcccatccggttctccatcttgaagaaggcgaggtgcttgaccatctgtgcccaggcgtcgggcgatgtcttgaacttcttgatgaggtcctctgccaagtaggatcggggaggggtcagctgcgacgtctgcagggagagggagagaaatgctagacgcactgccgtagccggtatagtggagggcctccatctgatggtcccccatgagcttgacgtgcgcctcgcgcgcgccagcgacgtcgttccgaacctgctcgtcgacgacccactcgagctctcgcgccttgccgcccttgggcgcagcgtgcggcttgacgttgaccggctcgagctcgatccggcccttgtcgagcgaggccaggacaaactcgttcatccggagggtcggcgtgccgtcgagcatcgagtgctcgccgttgaagccagagtgggccgagggcgtgacgatgtctgcgagagagaggggtggggcagagtcagtcagtcgcctgcatgagccagtcgacgtgcccaggagcgacccacactggtgcttgtcgaaccagcggttgctggcctgctcgccaacccaaactcgccagctgaggtcgacgagccggctctccttctcgccctcggtctcctcgcgcttgaagggctcggtgtcgtcgagcgcgacgacaaccgtcgccgcctcaatcttctcgatcgtcgccttgttagttggcgagagggcaaagaggtgctcgcgggcctgcagacgtgaaggggccggtgttggttagcctcgaccttaccagccagacagggccgcttgcgcaccttggaccagacgtcgcggttggcggccgtcaagacaccgatctgctcctttccggcaacgtcgccgacctcggcgacaatctcgttcagcaggcgctcgatttcgtcaacgccaagcccgccgacgcggacctcaaagtagcggttcttgcggaggataatgacgtggtcattctgaccgtcggccgtcggatacttcttgggcaggtcggacgggatgacaggaatgcgagaggcgttgaagctgggcggcagcgagacgaatgtcagtttgagcggaaggcggcggagaagagatgggctgcgcacaggttcttgagcgacgacatggcgagcggcgtcgtccgcgcgcgctccggctcaagctgctgcctgcggtcgcagagagggtatcacgggtcagccgtgggtcccaaagagcgtccgaccgcaagaggggacgcacgactcgacgaggtcgcggaagacgtcggtcgcccggatgagctctgctgcgcggcgcgtctgcgtcttgccctcgccgccggtacccctgtgcgtgtagaagtagttgacgtagggcacgaccgggtcgctgcaaacgaaggtgaagtctggcatcagtcggaggtacgtgcaagaggggcaggagaaaaaatggcacggaccggtacgacatataggcgacctcgtcccaccactctgccagccagctgtcgcggccctcggccttggcgcgatgctcgagccggctctggagtgtctgggcgagctcgctcgcggcaaacttgtcgaccgcccgcttcgagctggcgagctcgtcggccgtcagatgcggcgagagcgtcgagaggtagagcggtagcgtgtgcgagagcggcgggacagggaggttcggcaggaagggctcaaagcggagcatcgccggcgccgacgggtccgactgaggctcgggcgccggcggcttcgacgagttcttgcggaccgaaggcttcattgttgccgaggaggaggcggaggccgttggctgcaggaaagggaggtcagaggagggagatgagcgacgagcgtcgagtcggagggagcgggccggcgcacctgggcgttggatgggccgagggctgggagcgtgcgtttcgagaccatgctgacgctgagcaggcggcgcgagagcatagggcagagagagagtaggggtgggtgtcagggagagggttggaaagaggttggcggatgagagtgaaggaggaggttgggcatgaggcaagggttcggcccgccggttaagggacgaaccgggggcgagaagaagccggcttcgcccgcccgccagtaggacgtcagcagcgtgactactctcctggcggccaacgacgacgatgacgacgacgggagtagggacagagcgcgcatcctgcaccgggccagcagctcgtgctgcttgtccaacagcgagaagggaggctgtgctaccaacggtctctctcgcccggccggcttcggcttcgttcgcggcgttcacccccaagcggctggctgatcacggaggcaccttctcctggacccggcggcggatgtccctcttgcatcaacgagggcagctcacgacgcaggtcgtgcggcaggagacagtgctaggaaggcaatagggcggctcggctcgccctcgtcaagtgaaatactccacgccatggcgtcgtccgctcccgccgaggaggtggcccgccgaggaggtgggacgacctcgccagccctgggtgctcgctagcaggcggcaatgtcgtcgaatggtagatttcgagtcgcttggcagggtgtgtccctcgtcggctcgcgctcgtccgcttcaaaggctcttgattgccgacctttgagaggtcatgaccctcgcagcaacagtacgtgccggccgagaacgtcgtgtacctgctcgtcggtctctctcttgacattggattcataagcagggctctacaggtcggtggatcggtcttggcctcgcctgaatgagcggccgtttactgccctcaacctgacccccggcagttgctgattcctatctgcgcgcccgcccgccgagtcgtctcgctatcttcgctctcctcacgccgtcgcaagggcgcgctactgctgactcagcgcttggtcgagccagctcgcgaaattgcgatcggcatttctctgcttaccctgctcacttgtagccggccgactaaccaaccaagtcgtgcgacggccgtcgaggagcccgtctaaaattgccccgtcctgctataaaaccggtccgggcgagcagcgaacaaaaacgctgggatccagaagctcagtggcagagcgtgagattgcaagctgtacagctaatgctattcggggttgaaaggcgtggtgcaggtgcgcggtgggaggagggctgaatgcgcagacccggccgcccgactgggccaatatcccgcctgacatagcaggtcattacttgtagacagtatgtcgagagcatgcataatgcgtgaaaagctaaaaagtcaggcgtgtttgagcggaggaagaggatgcggaggggtaagggtcgcagcgatcgaccggctgacgctgagggaggctgcggccagggcgatgagagacagatgacagcgacatcgacagcagcgtcgaaaggagagagattgcaccgaggagcgagccccgagcgtcgatcgaattaaagggcgtggtggatcggggacggcctaggagtagccgcatacgacgtcgaccgcttacgaccgccgaccgaccaatgaaaccgtcgcggtcggcgagggctgcgccgtaaccaacgaggtcgtgccaggcggcggagcgtcgtccgatctcttgtgccaggcgccacggaggtcgacggccgtcgtgtttgcgatgtcgatcccggcgatgacgtccgtctgagggccgaccgcgttcttgtacgagttgaagccccaaaggccaggaatgtcggtcactgtccagccgttctggatcatgctcgggtaggtgttcttgaagactgcggcgagaaggcgaggaggagtggtcagcgacgtggccggggctgctgttggagggacgcaccggtgacgcagccgtcgtacagctcgtgctggaggatcatctgcccgggcgccttcgggccgtcaatgaccgcctggaccgtagctgtagagttgacccgatcgtcagctcgccaatcatcttctcaaacggtcactcaagctgagccggacgctcaccttggatttcggcgagctggccgtccgtgccaaacgtccaatcctggctgtgaggcgggcagaaggtcagccaccgagttatcgtcagttgagatgagggtctgcactcacgagtcgctcgtccagatgatggtgtggaggccaaagacctcgcgggcgattgcccggacgcggttgtcgacgtcgccaaagggcgggcgctgacatcaggcgaattcatagttagcgctgaccgctgagacagacgaagcggtctacaggtcgcacccagaaggccggaatgcggccgccgttgacgtcggccaggactgaggtgcagcgcggtagggtcggagcgtcagctgtgctgtcgcagcgtcagtcacgctcagagaggagcgcaacgcaccctgcatcgaccagccgagctcgccgacgagctcctcgttgctctggctgctcgagtagccgtgcgtccacgtgtgggcgccaaaggtcgtgagcgggttctcgcgggcctggagggcgatgtcctacgaagggcaggattgaaaagagcgaagtgtcaatagagctacagcttctctctcagtgatgggcttccgatgcaccgtgttcttgacgacgttcgagccaatgtaaaagagcgtgttggggatccggttctccttgaggaagtcgttcagcgcccggcccggcggcaggggcccgtcgtcgaacgagatctgcaagcgagggaggcctcatcagccaaggtagccaaatgagagtgaaggctggagcgaaacggctcgacgcacgccgatgtggccgtccgggccgttgacgaggtcatactcggcattgtcacagccgaacgtccggtggcaccgggaagggtcggccggcgagacgccgtctggatacgaagggctgggcggagagaaggctcagaggacagttgacgaaagcgagcagacgacgacgagagagtgacgcacattccctctaccattgtcgcagcagggatgtcgggaatcttgccttgccgctcgacttcggccaaggcgttcagccactcctgtttagccttgggaatggtgccggcaggagggtagcgggccttccagtctgttcgaagacaagcagcggggcgtgtttgtcagtcggctgtcgggaagggagtcggccaggacgacgcaacacgcaccagcgctgccgacctcggagggcgactgccgcttgaacatccgggcgacgtcgtggtccgtcggcattgccgaggtgagctgcaaagcaacagcagaaccggcggcaacggccgagaggagggaggagaggatcaccattgaggcttgtagagtgtaagaaaggtaggaggggagaagggtgatgagcagcatcgaaggagaaccgcaagacggctcgcctttatactcacctagcttgccgagctaagaccgagcatgttggccgatggctgtccgcgccctgctcggtctctcgtccaagccatcgtgctgtgcgtcggggcggggagattggcccgctgcccgtctgtcggcggagaccaaccagggaagttacaaccgccaaggcggcttactggcgcggccgtggtcgccgagccgttgacatacccctttcggaccatgtatgcacgtcagtgagacacaaggacgattggcggcccggaagaccgggagtaacgcggcctgctcgctccgatacgcacggtgaggcacgccccgcatgcccgtcttctatctggataccgtcgcctcgcgagatcagcccagaacatgaggaggtccaaggcgctctcaagcacgcagtcagcatcaccctgctcggtcgagtcagcgacgacgcgctctcgccaactagctggcgcaccgcaagtgaccatctgagcccagccgccggctgctcagcgagcaggtcggctcctcgtgccaactccgccagccgggtcgagaggtagccacctgcgacaggctaagcccagcccgtccatcgcccgggcgaatgagccagtcgcggcggcgacgtcaaggccgtcttggagcgagtctcgaagggatctgcaaacaacggcggccaggagctggaggaggccgctgctggaggccgtgcttgcgacaccctgcctggatcggagcagaccgtgagggcagctgtatcgagcgtcggctggcacctagaagggctcctgcgagggcttcagctttatcaagctggaagaggctgaggggcgggtgtcgtcgtcggagggagtgagcgaccggacgaacctcgctcatgcgcagcagtctgcagcccctcgttgcctcccgttagagtcccgtcagaccaacgtcagaccaacccgaggagcaacgggtgactgcatgctagagcagatatagaggccattgacactttggaggctgcaggagagagtcctgctggcaattgaccgcaattgaagatcgctgctcaccctgcagccggctggccgaccgaccgggtcgtgcggcgactgtcgggcgtgccgcccaaaaaggttttttttgtgttgtatatgatgagtctgcatggaactcttaacacagagatccaatagctcagtggtagagcgtgagattgcaatcgtcacagcccctcgcaaggttgatcggtacacctctcaaggccacgtgttcaaatcacgtttggatcttctttttgctcttgacgtggcgaggcatcacttgagttttaattggtgatgatctggcgcaagatttggtggttttaaaggacgacggccgaggagaatacagcgctcttaagaggagagacctagcgtaaggctgcggccggcctgtcctgggctgctgcgcgaacctcgcgcaccgaccgaccgaccgcgagctctcgcgcctgccttcctctccttgctctgaccatcttcggctctcaggtctctcggcgtgaggcactagccaacagaggaaactccatactagcaaagcttcaccttcatccgtcggcctccctccccttcgcttgaccggctcgctcgctcgtccgccgcctggcaccagagctcaagccgctccgaggtgcgttgagcctgtcggcccggcctctccacctcgtcgccctcctggttccagctcctcgaacctggcactgacacaagtgagctgtctgcaagtcggacttcctagacacaccccgcagcccctcgcacgaccgtagccgccctcgctctagacgagatggcgaccaagtcgatcaagtgtgagcccacccgccacctatgagctcgagcctgtccggccacaaacgttacagctctccatggtgctgacttcctcgtacctctcacttcctcctcctcgcaggtgtcgtcggtgcgtccgtcgagcttcgactcctcagctcagtgcagctgctgacgctcagccctctcctctgcctcgccgcccagtcggagatggagtgcgtagccgaccggctctgctcgaccgcgaccacttccgacctagttgtacttaccacaccacgcgactgctttgctcaggctgtcggaaaggcgagtccgccaggactgcaacgactgcctcatccgtgcggacgacctgactgacgcgcttcgccccaagcagacctccctcctgatcagctacacgaccaacgccttccccggcgagtacggtgcgccgatgatcgcgactcgctcgtgtggtaaccagggctcgaaactgacagtgccctttttcgctgcccagtaccgaccgtgtttgacaattgttggtcacccccttcgtctctcggccagtcgccctcccccgctgacacttccgcgctccccgaccccgacagactcggcctcggtgattgtcgacggcgagacggtctccctcggcctctgggatacggccggccaagaggattacgaccgtctgcggccgctcagctacccgcagaccgacgtcttcctcgtctgcttcagtctcgtctcggtgcgcgtcgccggatgcggcctccttcgcgtttcgcagtgggctgacagtccctccctacgtcccaccgtatttcagcctgctagctttgagaacgtcaagaccaaggtgcgcaggaggctctgaagcgaacactagagtgcgacaggctgaccgtggacgcccttgcttgacctcagtggatccctgagattcatcaccactcgcccggcacgccggtgattctcgtcggaaccaagcttggtccgtcctgggtgctcttctaccggtgatcggttgcctcctgactcccttccttcgtccgacagacctgcgcgagaaccccgacacggtccggaagctcgccgagcggcggcaggcaccgatcctgtacgccgccggctcgggctgcgcgcgcgagatcggcgcgatccggttcttggaatgcagtgctctgacgcagaagggcctcaagactgtcttgtgcgcagcgctccgaagagactggcccaagtcaagcacggctgacccttccgacatcccccttatgcagcgacgaggcaattcggtcggttctcagcccgccgccgaagccaaaggtcaagaacaagggctgcacgctcatgtgagcccctgtacgccattgcagaccggtggggcgttcctccacaccggccaagcccctaagctctcccttcacgcacctcccttcacgacacctcccgttatagaccgtacgcaaaccccttagcctatcaccacgcctcactcattttctacagtccctcacggtgcaatccgctgccggcgcattgcgacctgaccccacctcgcatgaccgattcctgacgtccgactgcgctgcggcgaacgtcgcgctacagaggcgaaaagctcattcgtactcggcctcgtcctcgtcctcgtcctcctgttcgaccatgccctcctcgcctgagagctcctcatcgctctcttcggacacgtcctcctcgttctcgtcaacgtcctcctcctctgagctgctctcgtcggcttcgaggccatccccccccacggcgagcgcgccgccctcggccatcgtcacgcacgtcaggcgcgtctttttgctgtcgtactgcgagacgggtgcgagctcgggcacggtggcgttggcccgggccggcagctgcgaaaggtcgtagaggttgacaaaaccgtcggacgagacggacgcgagcagcgggtagagcggcgacagggccttgacactgaagggaagggaagcgacgcagcggtcagtctcggtcgcagggcacgcgggtttacagagcgacctaccgatgcgtgtggccgatgagccggccgacctcctgccactcgccctgctgcaccttaccccagctccccttgccctcttcgtcgccctcgcgcgtcgcctggacacactcgtagacgcgcgtgtagccctcctcaacggcggcgacgagcagctcccggctggcctcgccctcgccggcgggaaccgaaacaaagtggaagtcgtggaagcgcttggggttggtgagcgtcgtcaacggcgacatgtccatgttgtagaggtcgagcgtcgtcgtcgagaggatcgcaaagagcgcgcccgacggcgagaagcggacaatctcgccctctacaggcggaaaagggggggggggggagtcagcacgagttcgagagccgccgagtcgcgaagtgaaggccctacccttgccgagcttgacgctgccgccggccttgcccttcatcaggtcccacatcttcatcgtccggtccttgccgagcgagagcgcaagcttgccggtcgggtggacgttgaccgagttgacgcggccgatgtgacccttgaaggagcgcagcacgttccagtcgcgcgtccggaagagggtgacggtcgagtcctccgaggccgtgatgaggtgcgtacgagaaggaaagtgaagagaggtaatggagcctgacagagcgagtcgcaagaatgtctgtcagagggcaaagtctgtcgcagagcgagctgaacgcaccagtgtgctgctggaggccgccgacctccttgcgccggcggaggtcccagattttgacgacctcgtccgacgagcccgtcgcgagccacttgccgccctcggacgcggcgaccgtcttgacgcacgcctggtgggccgggaagatgaagatcggcttcattgagtagtcgcgctcggcgacgggcgtcgaggccgagggcatgacgccctggagaccatacagcagcttctcgtacgagccggcgacgacctggaacgtcttgggtccagttgggacgacccgcttcggtgccgcgctcgtcactgacgtcgacggctcgtcggccgagtcggcaaacgccagcttcttgcccttcgagttggcggtcgtgctcgggacggcgtcggcgtcgacagcagcggtagccgcaggcggtgcagcggtggcagcaggccccttgcctttgcccttgccctttgcgctgctctcggcagcgctcgcgccggccgccggctgctcgccgccctcaaactcgacctcaacccgggccttcttgggcttggaggggccggccgcagactgaccggcgccgccgccgcgcttcttgctctgctgctgctgcttcttgccctcgcccgccgggggcttgccgctggtcggcttggctgccgaagcgcgcgagacgggcgtcgtgccagagatgggggccttgcgtttgggtgccatcttgagagctgtgaatgttggtcgtggtgaacgagcaaggcgcaggcggccgacccagcttcaggttctcctcccggagcgtcttaaccctaactttcagcgcgcgcgcgactcgcgcgcgaaccgacgcgctgagcgctcgaccttgtcctcccccttcgcaccgtcactcgctctctctttgcgcccttccatctctcgagcagcagcgaaccggcctccaaatccacgacggcgcgcgcacctcactctcctctgaacactcttacgctatcagctggctaccgatccagcaggcgctggcaggtcgggccagatgccgacgacgcgaccgccgccgggctcgccgccgtccctagccgactcacaagcgtcgatgacgacggcgaaccagctcgagactcagacgcagctgtcgaccctgccgcccgtctcgcgcgcgccgggcgtcgcgctcatcctcggcgagtcgcagccaacccagcagcagcagcagcaatggagcgtctctgacctcggccggctcggcagtgcgcaggttccggcgcgtccggcggccacctgtgacgacagccagggcagcgcagagggcggcgctgcaaatgtcggaccaggctcggcgtctatcgcgagcgagtggaagctggccttcgccttccctgcaggcagcagccttgagagctccctgcattcggccccgcacttggtcggtgtgctcatccggccgagcctgccagcaagatcagtcgctgaccccgccgtccccatgcctcacccaggcccctggacagcagcccaaggcgagcctctcgtccgaggcctccaaagcgcgtgacgagtcgcaggagggcgtctcgcaggtgcgtccctttcaatgcgcgccaactgtggtcggctctgacacgactccgctttctgcccggcagccgcccgcacaagagttggcgacgtcgtcattcgcgcccggccaggcgaccctcgtcgacccagccggggcctacacgcagatccactatgaccggtcgtacgagtcgtcgcaaggcaactcgccctcgctttcgaacgacgagatcgaggcgagcctcggctgggctccgcctaacgctgaaggtctggtcgcgacacagctcgccacccagacgcaactcgcgacacagactcaggtcgacatcgagatggccgagtcggatgcggacgctgagggcgaggacgagggagacgatggaccggcgcagctcggcccggaaagcctcgccgacgctgccgtcgcgacgccagaggagttggagatgaacgaccggcccttgctaccgaccggcacaaccgaggacgacagcctgtcgtccaacgtcggccccacgcagagcagcggccttcagtcagcgacgaccctgttgagccggaggtcgccctcggcggtccctcttgcgccagccgcactggcagctgcccccgacggcagcacgacgtcaaacgtcgacgacctgcacaccaggacgcctcttgcgtcggtcagtgcctggaagcgtgtgactcccgcaccgtcgccgctgccgccgcgacagcagtcgccgtcgacggtgccggcctccgacaataacgcgactgtccctgcgacgtcttcaccaggccggtcccttagcgataccaccacaactggcaggccggcctctctcccaccgctcggtccgtctagcagcggcttggtcgaaggcgttctccacgcgccctctgccgtctcgccggccgcgacggcggcggagccggccagctcacccttcccgatggacgatgccgtcatccccgactcgcagagagctgagggctcgacgcctccagctcagccgctgccgccagcaccaccacctcccttaacgacggcggtcgcctccaacttcgtcacggtcgcccaggcaacagcagcgtcttcaacaccagcctccgccgcccagctgccgacgatccacctcccgcgcgacaccgacgacgacgacgacgaagactacactttcggctcgacttacaggcggccaccctcggcgtcgcagcggctgccctcagacgcggctcggtctgaagacacggtgatcgcctcgacttcgcgccaggcctcgccatcatcgcccgccgctcgggcactcggcggctcacaggcggtctccccgggcggtccccggtacgcatcgcggccgtcgcggcagcatccgccactcagccagacggtcaacccatccgaggtcttcaacgccgaatcgtttcaaaagctcattgacgacgacctgtcagacctctcggacgacggccgcatccagcggactcagagccacgccgcacgggtgtacgagcagaagatgagcagcgcgcgctcgagccggccgagctcgacgatcggcccagtcgggagcgacggcaaggcaccccgaagccgtggcaggatcagctcggtcgtccagcgcttgatgggcaagcaggtcgagctcgagatgccagccgcaggtacagactcctacccctttgctggcagccgcctcggaagctaacttgccctttctgtaggcccgtcccggcagccggcacgtccacgctcgcgcgtctccgacgccgacatggctgatgacttgcacatccccgacttgcaaccggcacacgcagctggctcacttggtcccttcacttacgtcgacgaagacagggccgggccgtcatcttcagccaagggcaaaggcaagcggtcactctcggccgtgcagccgcagccggcgggcggacgaggccaggccaagcgcgtcaagcaggagaaagctgcagtaggagctggcaaggcagcggcaggagagctgcgcaagcaggcgccggccaagggtgtcaagcaggaggtcctcagccaggcaggcgcgggcgacagcagcaagaagcaaggcaagcgagccaagaaggactgggtgcgtcgcggtcaccctgcacacctcggggcgcaactgacgggcgtggctgggcaaccttttgcagggctcgagcaagcagaagaacagccagactcgcctctcgcttgccgagacgtcggtgacgaccgagtcgatcgaagaagacaacgaggctggccagcttccgccgccgccgccatccgctcgggcagcttcgacggccgccaagggcaagctccgggcttcgtcgaccgcaccccacgctggcctgacgagcaaccgcggcgtcagctcgtcaccagggccctcgcggagggcgactaaggcctcggctttgttcgaaagccgcgtcttcaccggctgtgtcgaccgggtctttgcgctctaccgcgagaaccggacctattatccggcgacggtcgtcgacgtcggccacgtcggcgacaagagcgacttcagggtcgcgtacgacgagggcgaaggccagctctgccacgtcaagaacatgcgccggctgacgctcataatcggcgacgtcgtctacaacgacgagatccgctacattgttcagcagcaggcctaccgcgaggagggcctcgaggcggatgccatcctcctcctcaagccggccgacgcggcccccaacacgaagcctaagcggatcaaggtccgcgacattgtacgtcctgcggtcagccgagcgcctcttctgctcgaccttgagtgctgacagcctgcccgccagatcatcgacaatctcgacatgaggcagatgcaggaccggacgctcagcgagagcgacatgctcgtccgcggccgcgtgacgacgttctacaaggaccggttgccgccgccacccccgcccgtgctcccccagccgtcgccgacacgaagccggaccggcggcctccggtcgacctcggtctcggctccgacctcgggcagcggtgcctttggctggctctttgccggcaaggcctttgccgcctcattcgtcagcgaatcggaggcgatcgccgccctcgtcaccaccaacggcgggctcaacctcgacgacatttccgacttctaccgcgtcgagggcgcgaccggcacgggcggcctccagaatggcgagtacaacagcagccacctcaagtgcgtctcggacaatcggagcgtcctcggcctcttcctcctcgccgattcggcgacgcgtcggcccaaggcattcaaggcgctcgcgctcggcgtcccctgcctctcgaccaacttcatccgcgacgcgctcgaatatcaggcaaccagcgagtctgacgtgcgtctactttttgtcgggttgctcgcgccgcgcagaacgctgacgccttcctcccttgcagccgctcgactggcgggcatacaagctcgcaacgccgccgtcgtgcgtcgccggcatcgaccccaacaccaacaagggcaacgcctcgtcccagtcatttatccatcccaactggggcacctcgcacgccatcacgcgcgacccgctccgggcgacgccgcctaacgtccagcggccgtttgctggcctcagcttcctctacctccataagtcgcgcttggaccgggtgcgtttgtcgatctgcaccaatgcaccgagtcaacctctcgctgaccaaatgcttgctcggccctcttgcgcaggagctcattgtcttcctcttgttcgcgctcggcgctggctcagttacggtcgcctcggacgagagcaggctcggcggcctccatcggttcgacgtcgtcattctcaaagacgacgaggccctgccccagcggctcgccaacggcctcgccgccaaatgccaggtcgtcgacgaagagtgggtcaagcagtgcgtcattgtcggccatcgggtcgcgttcaagctctggaagccggtgcgggacgcgatggaggctcaccaggcgcagctccagaaggcccagctcgacgaggccgttaaggaggagctcgcacggcgggccaaggctggtaatggcaacggcggcggctccagcagcggttcaagccgcagctgaagcgacggccaaaccccttcacgacgacccactttcgcatctctgtaacgaccttatgccattataccccacgtactccctcttcttttgctcgcttcacgaaaggcggccaagcttcgggagaggaagcgcggtcgcacgcaggcgagcgcaggggccagggtccgggcagaggcgggcctgaacggggcgtctgtcgcaagcgagcccaccgcggatagcatcatctacgaagacccactggtcgacgcccgtcaataggccgccctgcccctctcgcggcctctgcgctgctgctcggctgctcggctcgacgagacaacgcgacgccaggcgaggcgccgtcgcgtggcttctgctgccgacaaacctaacccgtgcggacgcgcgatgccgtccctggctcgcgggctcgccgatggtcgaccacttcctcgactgtcgacaaccgttctcgtcgcctcggagggaagctgacaactcttacttggacgctaaccccccccattatcagtcgtcgtccccgtcttccttcacccgtcgccaatctctagcctcacgatacctgcttggccaacagcgacctcgcacgcggctcgtctccagagttcgcctggacgagacaccttcctcttcaagctcagccctcgctcgcagcctcgctatgtcgccctcggcctcgagtagctcggtctcgtcctcatcctcagtcatggccgccgtccccatcccagccgccttcctcctcgccgacccctctccgtcgtcgtcgtcgtcctcgccctcgtcctcgcccgatgacgtcgtcctcgcaagtcgactcgcccgcgacgcagcattcgaccggtcctcggcctcggcctcgcccgaaaacacgagtggaagcagcagcgacaacggcggcggcagctcgtcgtccgactcgagctcaccgagggctggtgtcgtgtgcgatagcgttggcggtcaggccgggccggcgtcgtcctcggctggcggctcgacctgtgcgtcctccccagccaccggcgctcgtcactctgagcgactcttctgggctccagaaggactgaccccacccccttcctcctcctccccctcctcctcctcatccgggggggagtcggtcagcgagcgtccaaggagtcagaaactccctgccagccgcaacaacgcacctcccgggttgaggtcgcgcatgttgacctccttctcggcgccgaacggccggaccttgtagaggccggcgccgatcgcccgaagctcctcctcgccgagctcgccctgcatgtcgtcccggccgtcgtccatgtcggcctcggcaaccttgagcatgcagtccttgaggacctggtccatgacggggaccatctcctgcgggtagttgcacagctggtggtagagcttcttggtcggcgggtaggccttgaggttgagcgtgtcgaggttgaggttgaactcgcccgtctgacgcatcagttggaggtagttgacgtaggtcaacgtttcgccgtcctggtcgccccggagggtcgaggaccggacgccgagccgccggtcgtaagcgagccggtacttgatcttgaactcgcggaggaacgtgtcaaaggcgtccattgactcctgaatgacgatcgacgtgccccagatgaacttgaccatgccgccggcgtccttgttggccgcatccgacgtcggcaccgcctgagccgagagctggatgcccgaggacgatgggccgccaggggagccaccgcctggcagcggagcagggccgccagagcgagggagggcgacctgccgccggaggaacgagggcgaggctgagggagccgacgaatgaatgtcaccccgaagcgacctccggatgccgttgggcgtcgagttggcggatctgatttgggaggagcaaggcttgtcagcagaggagctgggagggtggcagcttagcgacagaggacgcacccggggaagaaaagcggctcggacccgccgctacgagctgagctcatggggacgttgccccggggccgactgcggtttccgcgaggcgtgccggcgccggcgcttgaactggggaagttgagcgggctcgagatgtctggagagaggtcgaggcggccgtccatcgcgcgtcagcccaagaggtgctcggaaagagggcgcgcacagcgctcaacgcccaacaacggctagccagtagcacagtgcaggagcagaattgtacgcactaccgttgtggggcatgccgagaccacgcatgggcgagctcatgccggtctggctcgcgagcgcctgccgggcggccgacagcggggcatgcgctcgaggcgtcgcggccgcggcagaggacgacgagggaaagtgcagcggcgaggacgcgcggccgttgccgttcgaggccgacggttcggccggaggggaggatgccatggcgagttggaaaaggaggtgaggaggaccagaaggacgataacgaagtcgaggagggtcgcgaggttgaacgagcggctcggcgcgtcgaagcaaactcatttcccgagaattaaaaaaggggggggaccttcgaagcagaggacgcgtcgacgagatgggagtcgcacggcagaactcctggccagatggagggacaggtcgtctgcagcctattgggctcatggtagatctggccccttgccctcgcggacccaggcaggcaggatgccccagcgcgggccccgacccctgctctcctcgcgcacccggccctcccactcgtcgccgcctgccgcaagctcgcgacactcgacctgccggccgctgccgccgaggcggacgctccagacgcgtgcgcagccgtcggcgttggcctcgccggcgggcaggatcacccgccggagaaggtgcaggacctcggccgcaaaggcgaggcagacttgcgcctcccacggcggaggcggcggcggcagcgtcgacccgttcgagacgggtggccggaccatccttgggatagccatcgtctcgaaccgctggacagtgtcgacgatgggcggattcgcccgccggaagccgacgacgacagctgggatcccgagcaggaacgactgggcccaaaagcggagcagcttctgctcgaagcgccggacctggccggcgtgcatcggctgaacggccgtcttgagctcgacagcgttggccaacgagccatcaaatgagcctgtagtcacggagcgcactgtcaattcggcaacgtaggcagcgctaacctggacggacgcaccgtcgaggcagtcgacctcgccgccgaggaccatgcgcacgccgtcgagagccgtcttgacgaccgcacaccactcctcgttcaggtcgacgtcgccgctccaccctggcggaacttctgaaggagcgtcggcaggaagtaattcggtcggcctagtagagtaggactcgaatgagaagccgttgtaggtcatgcgcttgccctggtcgtccatctcgctgtgtgagagccatcgcaagcgtcagcaagagccaccgcacacgagctgcgacaaatttggacgtaccgcggcggacctttgtgctgctcgaggtagatgttgccgtccacgacttgggcgctgagcctgtgcgacgagcgattcaacctcggctcgcagcgacgagcagcaagcggccgaactcactcgagcgagtcgtcgtcgtacggcgccgtcaggagcttggtcatagtccctcgaaagctcacaaagcctggacaagagaaatgagaaggggcagtcacgtcagtcgtcgactctgtttgaaatggcaacaggggccaagcgacgcaccttccttgcctttgccgaggaccttcaagccgccgagcttctcccgctcaaagcgcgcaatcgacgcgatcaggtcgtcgagcccctcgtcagccttgcgggcctcgtccggccagacgcagcgctcaaagccgtacgcgaggtctgctccgggcgggcaggacgcgtagcgcgcgaggcagcggttcgagccaaggtggaccgtccggtgggccgagggctcggtcggagccgtcacactgtaggttgctgatgcggagcaattccgattcgacgtcagcgacgggttggacgagcacgagcaatcggtcgcccagggcgtcggaggacggagctgcggagaggggaccgactgaagcacgacggctgctggaacggcacggcccgcttcggagcctgcgcggtccgcgaaggagtgggcaggacatggaggccgctcgtagaaggcccggatttcgagccagacggctcttcggaaggaggacgaccctggccgatgcgggcgcgcttcgccgggggcaggtatggctggctgggtcgagcggctgcgtcgacagccgagggcgacggcggacgccgcggcaaagaggaggccatgaggtggcagatgagcgagatctgagcgagaggaaggcttgccgagcgtgcgcgcgaagaaggtcagggctgaggctggagatggtcgtacaagggtgaaagggagcagggacgagcagtcggctctccgcagcaagagagcagccggctctcgttccgcctgactcttatccccttcggcgacgacgtgctgccagcatcccttctgagtatctcctcccgccccggctgacatggcactgtcgtacatgctgacctgctgctcgactgaggggcgactggctctcgaggagcaaccctcggcgtcgcgacgtttgcgccctctctcaagctgcttggtgatcgtgctctcgtcgacgatgatctacagttgtcgggcttcttgtctctgctagctgctgccgcgccttcctgtgtatggtccgaacctagctcgtctgacctcatctcctcgccatgctgttgagggccctcgcttgtcgccttacgaccagggctccgtccccactctcctccgcctcacgtctccagacttcgcgacgatgaccaagtctgcactcaattggcgtcctcggtcgatctagatgttctcccaggtcgcccagtgccgcgagacgaccctttcttggtcataagacgacctctctcatgcgtcggcacgctgacgcgctgcgaacctcctgcagtctccgctcgtacgccgcccgctccgtcgccagccttggaggatcccatcactgcgaccgtcgcgctccttgcacatgcccattcaaccacctcaaacgttggcgcatgctcctgcctcctcacgctcaagagcgcgttcgccccgagcgacgccgccgatatcggcgctgttgcaagccccggctggcgatccatgccctttctttggcgctcgcagaattgtgtgacgagaggcttagagccggccatgtttgagtcgccaacagctgccggactcggcctgcactctgctattctgctgagagctgttgctgcttgctgaggcgagccaggccggcggggcggcgaacggctgagacggtctgcgccacgaagaggcctcggcccgcctctttcacgcgcggcgcccctcgcaccagacggccgccgccgcctctgccgaattcgatcttgtctcaagcaccgccgggcgagacctccagtccatcaccctcgctctctcttctctgcggccggaccgctcctcctcatcctttcctacccaccaccatcttgcgaaagacctttgcgggacgcagcctcgttccctccctctccctctccgaatctccctcatcctcctcgcccgcggcgatcatcccgagcgctcctcttctccgctcggctcctacttctccctctgcggccggtctgctttgggtcccttcggtgcgttcggcagccatctttgccgaaggcgggtcggacccgtcttctgaggagccctgcccttgctgcccattcgagttagaggacctgttgactgaccgacgagctgccttactactcctctcttgcgcccctggcaaatcatcagctctccttcacacccttctcgccctcttcgatctcagcagcaagcccgagcctttgacgttctagcgcactcgacttcccgtttggtctcaccggccctccgcacccttcctctctctttccgccaaacacgatgggcgtcctccggcggctctcgcaggccttcagcggcaacggcgtgcccaactatgactaccaggagcacggcgagggcgagcagctcaatgtctacccgtcgtcctcgcacaacccttacccccagtcggcccagttccccaacgaccgctaccaccacgcccgcggcccgtccgaccagttcgacggcggcaacggcgaccagtacgactacaacgacgatgaccgccggctctcgtttgacgccgacgaagagtacgaccggcagtcgatcgcgccgtcgtacctgacgtcggccgccggccagtcggccgccgccctccccggcgacgacagcgacgacgaggacgagcgcgagggcggcgacaagtacgccctgatgacggctcacctctaccagcgggcccagtcgctcggctggttcaagagcaagaaagtcctcggaatgggagtcgtctcgatccgcatcaagaagaacctcttcaagtacgtccccgcccgcgtcgggcctttgcttgatctgcttgctgaccacttcgaccctgtctcgcaggacgttccccaaggccgacctccgcaagcgcgacggcgaggcccagcaggagtcgctcctcatctgggaccaggccgtctctacgctcaaccccgaggtcgccatcaagatcacgtccaaggtcgtccacgccatcatggctcggctgtgagtctctgcctagcctgcaatagacggcagacctcccccggctgatgctgccttcgatcgcccgctcgcagcgaccccaacgttgccgacattgccatcgaccccaacacgcgcatccaggtcatcgacgaaatcgcacaccttgccggagcgaggtccgtcccccctgcgcggggagcatcgctgctatcaacccgctgacggcccctctttgaccctcttccaggaagcaccagtttgctgcctttgtccggtccgaggcctgcctcgtcgtctggtccgacgaggtcgacacgatcatcgagtcggccgaggcgctcgagctgcgcatgatccagtacgtctgggcctcgaccaagcacaatgaggagcgcaacaagacgccgctcgccgtcattggtgaggagggcgccgagtcgacgtacgacctccagtcggtcgccaacgcctcgaacgttggcacggcgtccgggaccgagaagggtgcggccggctacgacgtcatgacgaccgaggaccaggtcggcatgggcggctggaccgagctcacgcgcaagcgccggcccgtctacctctttgcgccgctcatcaccggcctcgcgctcatgaccaactgcgtctttgttggatctggtatccgtcagtcgccttcacgagccgggtcccccgcagttggcaccgtcgactgacctttgtccctcgaacatgcgcgctttcgacctgcaggccagcttgtcaaggagtgcctgctcgacggccggtactaccgttttgcgctcctcgccaccacgcccttcaccttcctgctcgcgatggtgcgtctccctcaatccggcggtctgtccacggtcggctgacggcctctccccgcctcctgccagttcttctgcatctgtctcatcggaaacatctggcaggcgctcggccccgtcgcacagtaccacgaaaactcgtcgtactattctggcaacgcgccggagcggctcatcaagaaccggctgcctcacttcactgtgcgtccgctcggcttcctctcgtcggctctgcgcacctttgctgatccgccgtgctcctcttgcccgcctcgcaggtcacgatgcctgtctacaaggagggactcgaggccgtcattgtgccgacgatcgagtcgctcaagaaggccatcaccacctacgagcggcagggcggaacggtctcgatcctggtctgcgaggacggcatgcagctctggtcggatgccgacgccgaggtccgcaaggcctactacgatcggaacgccatcggctgggttgcccggcccaagcacggcaaggacggctttatggtacgtcgacgcggctggcttttcttgtctggcagtttcgacgctgactcgactcgctacctcgacccctcttcagcgcaagggtcgtttcaagaaggcctccaacatgaacttcgcgctcgctctttcacttcgcgtcgaggagatcatggacgagatccgcccggtcccggccgaggacgagaaggaggactggatctggaccgacgacgacgaaggcgagatctacgaggaggccctccagcgtgcgctcgaggagacgaacggcatcgcttgggcggccggcaacatccggatcggcgagtacattctcatcatcgactcggacacgcgtgtgcccgaagactgcttcatggacgccgccgccgagctcgacgcctcgcccgagattgccatcatccagcacgagtccgacgtcatgctcgtcatcggccactactttgagaacggcatcgcccacttcacccggcgcatcaacaaggccatttcgttctgctgcgccaacggcgaggtcgcgcccttcgtcggccacaacgccttcatgcgctggtcggccgtccaggacgcctgcttcgttgacccggacgacggcctgaccaagatttggtccgagacgcacgtctctgagggtgcgtcgtctattgacaacctttaggcactccgccgctgaccgaaagcctccacttttacctgcagacttcgacatgtcgctccggctccagatgcgcggctactcgctccgctgggcgacctactcgcacggcggcttcaaggagggcgtctcgctcacctgcgacgacgagctgaaccgctggcagaagtacgtcccgtgtgcctgtcagctcgttgtgacccgagactgacgccgccatctttgcaggtacgcctacggctgctccgagctcctcttccagcctttccgcaagtggttccacaagggtcccgtcaccggcctctaccacacctttgtctggtccaacatcccgctccactccaaggtgtcggtcacggcctacatctcgtcgtactacgccatcgccgtcgcgaccttcatgtcgctcgccaactggctgctcgtcggcatctggtcctcggtcctcgacgccttctacctcgagtcgtggcaggtcttcctcacctgcgtcgtcgtcttctcgttcctctcaaacatctgctcggccatcttcatgtatcggctcaaggaggccggcctcggcttctcgctcgtcgacaacttcaaatgggtcttcttcttcttcttcttcttctcgggcatgtcgtggcatctcacgacggccctcgtcgctcacttgatctcttacaacagtgcgtcccccttcaaccgtcttgccttttcccgcctgactccgactgacgccttcctctctgccctgcagtgacctggggctcgaccgtcaaggaggtctccatctcaaacttctttcaggaagttccggccatcctcaagcggttctggacgacgtatctctactcgttcgccaacctgatcggcatcatcatcatggcgacgcccctcatcccgcccggctaccgcatcacccagatgacggccattctgccgagcgcggtccaggccggctgccacattctcgtgcgtaaattactctcgtattctgctcgcccaagctcggaaagactgaccggctcgccttcctttttttttagtaccccatcgtccttaacccgtggctcatgatgttcaacttctaagccctccatctcctcccccttctgcctttctcggagtccttccttcctccttgctgtctgcgcatcgccctgtctcactggccttcatcattggtcttctcctatatcttgttatgtccaatgtctgtcttaatcagcctctgcgtgcgcgggtctggaagaagagtcagcggggcaaatcggccagccgtcgcgcgcacatacccatcgaggcctgacgtctggcggcgacggatctcgctcatcgtctgaaatacacacgccattcttggccgaccaggtcagcgccacaggcctgacccagcgccgtcagaccagggtcgacgacgaccagagtcgcagaggtctggcccgaggtcagcgaatgacaaacgtcggctggccctgttggcaacgtcaggtcgaggaggaccaacatcgacttgaccgttacgaaaagaacgagcccggcctgctcgggcagcaggttcgagacacgtcgacgacgtcgtgctctcggatgctcttccttcatagccggccgatgcggcccgatgggccatgtcgtcctcgtcgtcgacacatcagctgccttgagcgtgccagagcaacctctgcgccatgtcgtcagcgggatcgactgccagcgctgcctcccgagcctagcctcggtcagagaagcgcaaccggcgagcaagcattttgatccctcctctgcgagccgctgccttcgtcgacctcggccaccctgccctcgccctggcgcctgttgtgctctgctgccctgtttccatctcgccagcgctgtctaatcgcctccatctagccgcccgagagaggcgcgatgagtggctggagctgatatcagcagcaggcggtctctggatggttgggcggaggcaagcacggcggataacttctgcgaggagcggacccgctgctgctgtcgggcgaagaggctttcgacagcagcgctgtggattggtcctgatccacggtcgcgacggccgttccggccgggctcggaacggctggagggtttcgctcggctgcagcctgcagcggagacagcggccaatcgaggcctcccttccctcgctggcacgcataggaggtgggacccccagacgagccgcccaatccctctctggcgatagcggcggcgcatcaactgcacgtcaggtcagcagcccactcgaccagaggcctctgtcgagcgaagacgagcagcagaggcagcaggcaacgcaggagcacgagtcccgggaggcgcccaggatacgcgcccctgcccgtccagcccgaacgtgcaggccgcggcgttcgttcaatgggccgaccggccggctggtttcgaccgccgtcgaacagcgatatagacgccgtcgtgggctggctcggcgggttctatcttgggtcgggtcgaaggctgggcccgatttcgagctcgcgcaaccgacccgcccgcagccgcgacgagtcgacccccttccctccgaacagccaccacctatcgtttggcccgagttctggccagcctgggaggacgaggcgctcgggcagggcgagaccatgtgacgataaggccggcgtcgtgggcgctaatcgagggcagcgaactggttcgctcgctggccctcccgttcgacccagggctgaccgggatcgtacaaagacgcgggctgatgggcgaccgagacttgaccgtattccctttcctcatcacccctctccgccttccctcctccctcgccccttcccccgcccgaacccccacttgcctcgtgagtctcaacttgtatcctcgccttgagtttcgcgcactagctgactggtccatcgctttgactctcctccgccttagcccccgaatcgtctgtcgcctgcaatgtcgcaggtccaggactacgagaccgagaagaagtatgcccccgaggatgctatcgccgaggtgcacgccgtcgacggcaactttgaaaccggtcagggtggcaacgcgcgcctcaagcgtggtctcaaggcccgccacatctgttcgtcgcctttctattgcctgcagccctcatctagccgtaagctgacccggcgctactgaccttcctcttgcagcgatgatttccatcggcggtgtcatcggtaccggtctcttcctcggcactggtggcgcgctcgccaacggtggcccgctcggtctccttctcggctacacgatcatgggctccgtctgcctctgcgttatggtcggcctcggcgagatgtgctcctacctgcctatcgagggtggccacgtcgccctcgcccaccgtttcggtacgtcctcctgccagtgcttcctctcgcttgctcgctcgctgacctctgccttcactacctcagtcgaccctgcgtgggcctttgctctctctttcaactacgcttacaactggctcatcatcctgcccgtcgagctcgccgctgtcgctatccttgtcggctactggacgaccgccattaacaatgctgtctggatctcaatcgccatggtcgtcgtcgtcatcatcaacctgtttggctcgcgcggctacggcgaggccgagttctggttcgcctcgattaaggtcctgacgatcatcggcctcatcttcgtcggcatcatcatcaacgtcggctacggcgacggcggctacctcggcttcacctactggaaggaccctgggccgtttgtccagtaccagggcattgccggcacgctcggccagttcctcggcttctgggccgtcctcatccaggccgccttctccttcatcggtaccgaaattgtcgccatcgcttcgggcgagaccgagaacccgcggcgcaatctgcccaaggccatcaagcgcgtctacatccgcattctgctcttctacattctcggcgtcttcatcatcggcatcatcactgtgcgtgctctatttgctcctaggatgccctttgtcgcttttcggggactgacgctcccttctgcagccctccaactcggacggcctcaacctctcgaaggacgccgcctcgtcgcccttcgtcattgccatcgagaaggccggcatcaagatcctgccctcgatcatcaacgcctgcctcatctcgtcggcctggtcggccggctcgtccgacatgtacaccgcctcgcgcgccctttacgccatcgcgctcaacggtgatctccccaagatcttcctcaagacgaccaagaacggtctcccgctcgccggcctcgtcacctcggttgtcttcggctgcctcgcctacctgacgctcaactccggccccggcaaagtattcggctggttcgctaacatgacggccatcgccggtctcatgtcctggttcgccatctcggtcacctacatccgcttccgtcagggcatggactaccagggctttgaccgctcgacgctgccgtacaagtcccgcttcgcctactacggcgcctggtacgcctgcatcatgatcactatcatccagttcttctcgggcttcggcgtcttcctcaaccccaacaagcccggctacaccttcgaccacgccaccttctggaccaactacatcccgctcggcctcttcccgatcctctacgttggcaagaagttcatctccaagacgtcgatccgccgcgtcgccgacatggactttatcaccaacattgccgagatcgaggcatctgagcagcccgaggtccgccaccccaagtggtggggccggctcgccgacgccgtcttctaatctgcggccggcgcgccccttcctccttcctgtctctctctgcttgcaacttccttgtaccccataccttagctgttttgactccaccaaaagccaatccccttgtagagagcactgctctcccaacgaccccattccattgtacggccgccctgccagtgcgcggccgcaaactagatctcttgtacccgcggtctacccatgtcgttcgcctcctgattcttctgcgtctctcttcccgcgacggcttcctgggttgcgaggcggtcgtttacgactgctggctgcgctagcatctcctctttcaggcccattttctcgggcaaccagtctggtcatgccagagggtagccggcgccgtcgtgcctctctgcgaggaggacatcctagtgaactgctctcgctccggctgtagagcgtccagccttgctggtgcggcgagaagggccgacggccgagtgacggtcgcgcgcagcagctcgagccggcctgccaccggtcttcgtccaagtccgcactccaggtctgctctcaagcatggacggttgcccatttgctgccggcactagtggaggataagggtctatagacgacgacaacgaggacgatggaggcgactgacaacacgctctgtctcggccgaagtaagtaggaattccccaagcggcggcgggcggcggctttggaggacgattgcgcctgtctcgccgccttcgactcgagctcacctcgacctcgtcctctctcttgtcgcacgacacctcgttttcctcttcgctcgtcctcgagctcaactttgctgcccttcctccctcggcatccgcttgcgtcgaccttctccagctcgcgactgctctctggacgggaacgaccgctgcaccccctttggccgcggccgccgacctcgaagccaaatccagcccatctctcgacctcggcgagatcgaggccttcggtcgaccgtccctccatctgcccatcccgctcttttgccgcgaccagaggacgttcccgctccctcctcatcttccactcgaagcctcgccgccgcaaagggggaaccagcccacccaatgtcgaccgcccttcctaccttccgggcgcattcgccgacgccttcgagccggtcggcgagcagcacgaccgcctcgcacagcgcggccaaggccttcgtctcggccctgctcgtcctcccgccgtcgtcgagcccggcctcgtcgccgtcgacctcgttccgcgctcatcggcggtcgagcatctcggccggcgccgcccagcgcgggctcttctcggccatgtcggccgcgatgccagaagagggctacgagtcgccgctttcgccgggatcgctcagcagcacgccgccgccgccagagtcgccggtttcaccgctgggcggaccgccttcctttgatacgcccaggccgttcggtgcgccgtcggcggacgcaggagggagggggaagcgaaagagctcgcgccggccggcgacgagtggtgtcgtgctcgaggataagagcctcggcgtcaagcgggcgagcgtcgctacagggaccggtgccgccgccgctgtcggcgctgccagcctcggcctgggcggccgggcggcaaccatgagctacgtcgacggcgtgcgcggcatcttcaaggggatgggcattccaggtgcggcctccgcgattgagtcgatggccgtgggagagcccggaggctgacttgctgcgactgggaatcagtctcgacgttgcgctcgaccgcgctcatctcatcgcacatcacgccgacgctacctccgacccctccttcgccctcggcaccgctcgcggctttgccgtcgaccggaacgcaaacccctgcgtcatcgtcggcagcaagctcgaacctgacgttcctcattctcgtctcgctcaacgatcacgcctctcggccgcctccttcctacaccgcccggctcatcctcgagtcgggcaagacgccgtcgagcatctgctttgacctcgactcggagatccgcgggaaggaagccgagggctgggaagaggagcgaatcgaggccgcgctgcggtcggtgactggactcgaggcccgtcggaaggatggcgagtggaagggcgtcggcgtcgtcatcattggttcgttccttgcttcgttctgatttcgacgggcaggataagcgtgctgaccgcaggtcacgccacctcactcagcgtactcggccaacgccaacctcagcgatgccgtcaagcgtcgggctctcgctgccggtgccgacctcgtcgttcatccgccgtacgacacggtacatcccggcgtgcccatcgccatccaaggggtacgccaagctcggacagggctccttaccggtgtctcagctgaccacttcgctcaactttcctgaccataggcggccgacgctgcctttcaagagagcaactctggcaacagctcccttttcccgtcccgcaagacgagcacgaacgctttgcgccgcgagggaagccccttctcaccaccaacgacacctccaacggccaaggtggccttgccaactccgctgtcagcgacgatcgcccgctcgtcgtcggtaagccatcctggacttgccggccattttggctcgccccctcggcgggcgagtgtcgacgtcggcgccgtttcgctcgccttctcgcgtgcgctcgagcgtgtcgaccagattgccgccatcgacgaccttcaggtgccaacagaacgagtcgagcgggccgagtcggagctcgagctcgccgaacttctcatgggcatgcaccttgagacgcagcgggccgtctcgagtattggacccgacggcgagcagctgctccggccgatgacgcccgagaagcgacgcgagctcgccggcaagctcgacacctggggctttgagccgcatatgctcgacgagacggacctcttccgctgcgcccaaatgatgtttcaaggcgcgatgtggtgtgagggcctttgggagctcgaagtgccgcagagtacgtcccttgaactcctcaatcatcgcccggaggcgctcctcagactgacctcgtccccgtcaccttgcaggccagctcgacgcattcctcctcagcgtccggcagacttaccacgcccccaacccctaccacaactacatccacgccaccgatgtcctacaggcgacgtacacgttcatggcgctcgccggcgtcgtccctccgtttgcggcactaggagagctcgacggccggccagctcagccgtggcagcgcccgaagcaagggctcggtcgcgcaggcgatgtgctccggccagaagacgtcttcgccgtcgtcgtcgccgccatcggccacgacgccgcgcaccctggactgtcgaacgttttcatggtccgtggctcctctcgtgctttccgccctgtccaatgactgacacccgctcggctacacgccgtctgataaattctgcagaaaaacgccaagacaccgctgtcgcagatctacaacgacacgtcggtcctcgagaacatgcactgcctactcatcacgacgctgctccgcaaacacggctttacctttctgttcggccccgcctcgagcgcaaccctcgtccgaccctcgatcgggccagcgctcgactggacgggcttccgcaaaattctgttctcggcgatcctcgcgaccgacatggcgatgcactttggctggatcgtcaagctcggcgagctcggagacaagattgctgaggatcgctgctcaatggacgcgaccgaggtctgggaggaccgcattatgatctgccaggcgctcatcaagtgctctgacatcagcaaccccgtgcgtttggcccgccatgtactcctgatcctggcgtcactgacgagagagttcctccttcccagactcgaccgcacgccgtctcggagcattggtcgacggtgctgctcgaggagtggacgcaacaggccttcctcgagtctggcctcaagctgcccgtctcggtcgtcaagaatgcggacgccgccctgcaggccaagggccaggtcggcttcatcgatctcttcgtccagccgctcttcaacgccgtcacagaggtcatccctcgtgagtgccgtcttatttgctcctaccatttgagacggtccagcttggctaaccttctcaaccgcagagctcgagccattcgccaagctctcggagtcgaatcgggcgctctgggcagaccggctcgccaccctgaccgaggcctccgcgccgtcgatcccgatcaagccgagcaagtttagcggcccggcgctcgacacgcagacgttcagcgtcccctgctcggttgactcgccctatcggaccgtctttccgtacacgctgccggggacactcatcgccgagatcgtcgattcaaagctgcccgggtctaccctcttcgagcagcatgtcgaggacggctcctctcctcaggctgggccgtcagccccagccaccagcccgtctgccagcccactctcgccaatgtcgccaacctcgctcagccggccgacactcgctagcaggcaatccggcagtcacaagcagtcatttcgaacggcttacgaccagggcgtcgggcggcgcaagcgcgagtcgaccttctcgtcgacggccacgaccggtgccggtctgatgccggttcggcccggccatggccgacttcggtcgggctctcactcaagccagtagaccacctttgtcacgctctcccagcgtcccatcttcgatcgtcaggttatcaatccccctctatgcatctcatctcctgcgcatgcccgcagcggaaacgcggtcctaccaacactcgactcgtccttccaccctcgcccccaatttgtccttcgctcgcgcatttagacatcctatcgctgcccgatctccttcggttgtccccttcgcccttccgggctcaatgtactacgctcgcctttgtcttgtaaaatgatcgcgtcgctcagctcggctaaagtgagtcgactggcaggggctggctagcttgaaaagtgcatgctaacggagcagacgcgagagaatgtcgaggcgaatgctttactgcaagcggctacttcgcaagtcgccaaggcagcacgttacgcgtcatcacatcagaaggatctccatgcgcatgcgccgcatcaccagcagccagtcgacccgctcggcgccctgatggcgcccgagagcctcccactcgtcctggagttgccacgtctcatcccggagtaggcgcatggggccgacgttgcccatgacctccgactcggggccaagggtcgaaggcgacatgatgtcgacgaaccacggccggtcgaccggcatcgcgtagagcgagccgagcaagagggggaagacaatcgccggcaggcagagctttgtcggcaggatcgagacgaggtcgatgatgctcgagacggcggttgcgatagccgggtgcgtcgggtcgtggccatgcactgtggcggagaggtaaatcgagcctgcatgggcacacagctggcagcagaggaactgcgagggcgaggtcatgtagagtgagccttcggttgccgcccgatcggaaccaacacgccacgcgttcactcacgttcatcgtccggaagggactgctgaagtagtcgtagccaaacattttgagcgactcctcgaacgagtcgccgagcagggtgtcgatcagcgcctggataggcgccgcgcgcgccgcgagctcgagcgggtcgacactcggccccgacgcccgcttccacgccttgaggacggatccctccagaaaaatgcggcagatcgtgttggagctgctgactgcaaggggagaaatgcagtgtcaaggagggtcagggcaagcggcggcaggcttgcaggagtgcagcgcaccatgagacagctgaacggccgagaaaggcgcgatcagcatcgacagcaggtcagaggcacacgggggaggacatacgaggtcggagccggtcgacaggtgaaagtgcggtgacgtcaaaagggcctggtaaaagggatagagtggcgtcgagctagagaaaggaggcgcgcaaaggtcagtatgcgccaacagtgtcggtctcacccgcagccttacttacctctcctgtgaaatgcaggcggcaatgtcgatagtgacgacgcgtcgcagctgccaaacagcgagcgtcgatcagcgacaactcgactgccaggctagtgcaagacgagctggggcgacggacgcaccaaaaacaggatccgttgatcgagccctctgacgtcgacgatgttgaccgcgcggttgtgcagcgtcgaaaagaggctctcgaggcaccagcgcatggcgacgaggggctgctgccagccgctgatcccgccgtcgtagacgctcgtccagatcaggcgctggcaggtgaagagggcggtgatgacgtcgaccccttctacgtgcaagctcgagacgagagccgtgtctggtgaaaggacgaggcaagagattcagcgtgtctgcagcgactcgactcatggacagggtgcgagacgaacaggctttgtgacggtaggcttcagcctcgtcgttccgtttggacgaagaccagggcgcaaccgctgtcggccgcccagccgaggccacgaggctctgccgcgtcgcacacaagagcttcttttcgcggaatctatcgaagaggtccgaatcggcgcgcgtcagtcatcggtcgcctgcgacgctcagtttgcaaggagtttgaacctactttgacgccagggcgcacgcagagtcgatgaatgttttgttccggagcgcccggtaggtgacagtcttgccgacgagtgcctcgtcgacgcagtcgcatcgtgcgtcagactggttgagctggtggtggagcttgttgtgctgccggagctcctgctcggagacggcgatcgaggcgtagacgtcgatgaaggtgacgctaaggggcagggaaccgtcagcgcgaaagctggccggtgagtgacgcgtgcctaacgtactagatctggatcagctcatactgctccactggcaggtcgagccggagtagtggcgagttaagcggccgcgggaccttggctggcgaccggagagcagcgaccagggcgtccgtctgccactgcggggtcgcaaaggggccgtactggacgttggctcccatcggcagcgccgtctgcgagggcaaaccctcgttcagtggcggcacgactggtaaagggtcgacaaagtggaccggggctcgggtgtaggccgactcgggtagaaacgactcggccgggaaactggctgcttcgaaaggattgatccatgaaggcgtcaccggtccagaggagatggtcgagatggtcgaaggcagcgtgctgctgctgcttgtgctgaggaaactctcgccctgggcgccctcactttgcacggccggtccaggcaggacggccaggctcggtcgagccggcgcctttgtaggacggccagtcactgcatcagccggcggcggctcctcagcagtcgctgctgccgccgtcttggtctcgtacgccgcttcgtacggcgcaaactcaaacgtctcgtccgggtcctccaccggcggagcctgcaacgccgcagccgacgtcggcccccgactgcgattcggcatcttgcccgtgcgcgacaggaaggcggtgaggtcggagcggaccttctgggcaatggctttatcgcggaggaactcagggcctgtaagaagaaagaaaacatcaacactagttgcagcctgtcggctcggaaccaccgcttgcgaccgttgacgcacgcttcttctggtagccgaggcactcgatgttgagtcttgatgcaagagacggcgggaaggggtggtcagaaaggaatgaggcatggcggaagaaagtgaacgcacctcttgcacgtctgagtgccgccgcgagcagagggtgtctggtcagcaggtgcgacgccgggcgagagctcccgcggtcgaaacgtacgtcgcatcccgggtggcctaaggcgagattgagagaagggatcagtagccgttcaggcagcagcaaggagcaacaaagacgggacggatgctcacgctggtcgcatttctagttgcggcaagacgggaagcaagggaggcgcgacatgtcagcgggtgcgcggacgcttgacgctcggcacgctcgacgctcagcattcgacagcgtctaaatccagctgtgttacatgcctaccttcttgcgcaaactggcgagaggcgataggaggacgaagcttcagtcagatgaacgaccgagccgagctggcagctcgagggacacaggaagctgctgaccggcagacaatgcatccctcgaacgagatcgctcctttcgagcgtgcagaagcggcgttcgagccgacctgctgtcgctgctgtcgctgctgctgctgctgctgctgtctttttgtccgcgacggcggggctggaggtgctgtcgacggctgccagctgttcccggccgttgaggtgctttcggcgagctggtgctgctgctgcggtcgcgctgcggcggggtgcccggggggatccggcgggtgatagtaggccatggcttgagcaggactttgctaggagtgaggaaagaccttgctcggaaagcggatgttgggggtcgccttttgatgggccgaaagagaaccggagcggctgacaggctggctggtcgaggcaagcgagtgaggcggagaagggcgcagcacaatctgtcctccgccgcgaggggccgaggccgggcttctgaacgccatcacgcccggccgaaaccctatacagcaccgggcacctgcttctcctccatcttccctgtcgctcgagccggcgccagaagagcatgttggtaggatcgccatcggcagaggacgaccgacagctgtcgcgctccactctctgccctgcgcgcagccgccggtgtggcgctgacataaatccgtcagctgggcggcggctcccaccgggcccgcaacagcgggttttgataccgagggcaggcgaagagccgagagggggtgggacggcacgaccccacgagaacgccagtcatgggccgggccaacctttcgggacgacagatctacgcgaccttcgctaggcctcgacggggggcgatgctcgttgctgctgagcagcccttggccgtctgctgccggcgcctcgtgatacgttcctctcagtgcggtcaggcctcagggcggagggtggacaggagtgaagggtgagtgcgagctacgagcgatggttcagaagagcccgaaactcacgagtcatggcggatgacgcgaagcatccgcggcgcaagcattgtccgaccaagtgcgacgtaggtcacacgtacagccagcccaagacgaggcgttacgtcctcgctgcaagggcccgatgtactcggcctcgtccttgtgacgtcgatgaggaccctcggccagggccacaatgaaggagaggagggtgatggaaggcgaaggcgttccggccgagtcgactaaggaaccaatgtcaagatctgtcagcgctggtcgaccgccgagccgtcagacagagacgtacgatgattgacgaaggtctgcgacccactcgacagctcggccgatcgtaacgcctgtcggatgctggcctccaacgctggatcctgcggcgaggccgtggcgacctgggcaaggtcgaggacgaacagaatcgtcctgtcgcctgacccgggctgtgaccggaggccgtccaagcagccgcaaagagactcgaccgtcttgcccttggcaaggtgggcgaccaggtcggctgcatgaacgacggcgaagacggtgtcgtctgccagatctaccggtgttccggctacgcgggcgaaggtgaaggcgacgctcagagggctgcggacggtcgatgcgccggcagcgagcgtgccttgtatgccggcaagatctcgcacgagagggtcgatgacgagcgtcctgagcaggtcgagcgggagggcggctgaacagtcgtcggcgaggtggtaggtgacaggcaagtccttgcaaaaggagaaggccgtcaaccagcgcgggtcgatcattggtcccaggggcgggattcggacgtttcgctgcacggcagaggtcgtctgtcagtcatctgaatactcggggagcgagatacagccgccagaggcaaccactgaccgttcgcctcggctggactgtcgggcgtgggggcgcagcagcaggctgcggtcgcgtcggcggacgcttggctgctgctgcctcctgctccgcctccttcttggccttccaggtcgagtagggctacgataggagaggcctggtaagcctgtatatgttgctgtccagcagcgttgtgctcacagggacgtgccgcccgtccttgcgccagccgctcagacgaagcgacggccggctgtacgcaacggctcggagcgagacatctgccgagagaccttctgccggcgtcagaagagaccttgaggaggctctaagtagagcagccatcctgtgcgacgatccggtcgagtcttcgtcgtcgcgaaggagatgagttgacggtagatgaatcgagggtcggtggtagagggccagagtgtcgacgctgctcgcccttctctcgtctcgaccatcacccatctcctgcctcataaccagactcgcacccgcccgatcgactccacttttcatcgtcggagttagccacccgcccgtgctgcccgagagcaccatgtcgacgtgcacctcgctccgcctggcgtcgctcgtcacctcgctcgaccagctcggcgcgccgtcgccgccgtcgtcgccggacctccggcgggcgagcatgctgcggcggacgacgtcgaccttctcgacgttccacgcttttacgcctgtccagaagccgagctcgcggtcgacctcactccagcaggccctccaggctctgccggccaacccgacggcggccgagctcggggctgccttgcgcgcgctcaagagcgctggcccggcgaccggcacgcggcgcgactacttctcggcgacggcccagggcgacgagcggctgctcgagtggacgctgctcgcccgcgtcgtcctcgcaaagtacggcatgcgcgtcaacgagctcgtgaagagcgccggcgactgggaggacgagattgactggtggaagcggctcgacagcgccggccgctgggcctggggcggtatcgggggctactttgtccagagtaagttcgcaactcgaagagatacagaactctagaaggtctgactgacgcctgcgcctcccctgtcaaagccttcccgcatcggctaattggtgcctcggtcgggctgtaccagtcacgcgacaccttctcgtatcggagcctgacgccgacgcacctgttgtcatcgctcttcccgacgacgccgatcccccgctcggcccagtacttcttcaacccaaaggttgtcctccggatgacgcggctcgaggtccgggcgaggatcgccgagcttgaagccggtcgcgacgcacgcgtcaagaagctcggcaaggttatcgttgaggcgcccagctttggcgacgctgacggcgagctcgacgccgagcggctcggcaaggagctcggccgcatcatcgtactcctgcacgaatcgcagggcgaccatgaggccgacgacgtgcaaggcggcttgccagttgagatacactcgacggccgagccccagtcgctgctgccgcatctcgagcggctgctcacggcaccagtaccaccctcgcagccccccgcgcacctgacccgaccacggacggctactcgtctctggccctttcttgttctgctgccccttgtcatccgccaggcggcctcgtaccttccggcactccaggcaagcatcggcgacgcgcgcgagatgatccacggcttctggcagggctgggttgtcgaaccggcgctcggcatcatcgacaccgtccggcacggcggcggcgaggacgctggaaagggcctgagcgtcatcagcaaggacggcatgaagtcggacatggacgtcagtcacccttggacgccgcctcggaacagccgcggatgctgacgcgggcatttctttttcggccgcagtcgctcgagcgcatggtcgtctcgctcgctcaggacaagaagtcgtacacgccacatgagcttgacgtgctcgccagccgtgtcaagaagggtgacctctcggacgtcctccggctttacgaggacgacatcaaggtcggcgctcatccgctcgtttctggccgcttgcctggcccctaaccccttgaccacctgcctgtctcgcagtcgccgctcaagagcgccatctcgggctccctcatccgctcgctgctgatccagatccagaagaccaaggtccgccgctaccagtctcatcttctgatttgctcgattctcactgactgggctttgatgcctcatctcacaggtcgacgtcgacctcgccctctcaggcatcgaccatttgctgcgctcgcaggagctcacctttgccttcgttggtgtcgcgccgtcccttcttgtgctctacctcttttcaggctgggtgcgcgcgttcctcagcagcgcaggcggcctcgctcttggcggtcgttcacgggccgagggccggcgacgatcttgggagtcgatccggtgcgtccaaagttgctcggcgagtgctttactcagcgtgctgcttgacgctgacccggaactgtcactacgcccttccaggcgcatcgagcgcatcctgctcctcgccgacaagcagtcgactgcgccgatcacgagccacggcccgtcagcaatccaggccgacgtgccgtttgagacgcagggcctgctgctcgtctcgattgcctctctccgcgatgtcgccaagcgcgagttcaagcggcgcgaggcgacgcgcaaggcggttcgttcgctcaccggcttatctgcactgcgcgagccacatcttcagcggctgacagccatcctctaccctctacttcaggagtacctccaggacctgctcgacctcgagaaccccgagatcgggcggaagagcaagctcgcgacggtcgagcgaatgtggcgcagctggggcccgcggctcctctggaccgggcggacgccctgaagggtcatcaacgccgatgggcagggaccggccgaaagaagatgcagcttcatcgtacatctggtcagcactgctcgctggacgaagcaggcatcaactcgcgtttcggcggtgggagaagcaggactgagcggatcagagcgcgtcggctcgacaagcccgaccgggcgcgatcgtcgcactcggcgtctagccaagccgcggcgagcatggcccgacgaggtggcggtaagtatgcagagaaggcagtcgaaggcgtaaggcggtggaatgcgctcgctcaggcggcggcggcggcggcgacggaagccggttcgccaaagccaaaggcgggtgccgccttactaggtccgaggctggcctggcggtgggcccaaaatctacagaagtacaaattactaggatcagcagagcacgaatgaggcgaagacggagaagctttgacgcacagccggcggatggggtcgatcgacttgagctcgtcgaacgccttgcgagcggcctcgtcctcgcccgactgctcggctgcgtctgcgagccactcgacggcgccagcacaccctccgcggtcggcgcacgactcgtgcagctggcgcgcaagagcggatcgcgaggcataagggaggtcaaagcggttgtggatgctgcgccggaggatccagaagcagtgtcagcggcagcagacggtcgatcggccggtacatgtgaaggcccgacgcaccctcgaaggtaggaccatgcggaggcgttgttgggtactagcttcagctgcgacagggtgtacctgaggaggcgaagacagagtgagtgtccgatcagagatgagacggaggagagcggccactaagacacactcgacctcgcgctcgacagcctgcgcaccgggtgcgtcagcccgaccgaagcccaggaaccagcgatgcgtccaggccgagttgttgcggacgtcgccctcatgcgtctcgcgtccctctgaagcgccgtcgtctacccacgagtcgtcctccggatcctccttggccaccgtttcggcctcgccctcgaccgacgccggcgaatcgacctggagcaggctggtcgtccactcgagctcgcgcgcccagtcggcgtccgtcaggagcgcagcaaagtgggtcaggacaaactggcggtaggcccacgtgtgatagttcttgctgtctggcaggagcgagcgcgagatgaaggcgagctcgccggcaatcgtgctcagcgagatgggcggcggcaggtgggtcaggagcagcagccggtgatgcctgtattcaaagaggcgccaatcagtcagcacgtcgagcagctagcaccattatagtgattcgaaaggccttcaccagacctggtaggacttcatgttgtcctcggcgagccggttcatgagcgccagctcatccggcaggctcttgccgagcgcgatcagcgtcttgaaccgatactgcctgtgaggcgacagagggcccgcggatggatacatcagctccttggatcatccgtcggcaactgctggctcgaaagagacgcaccagacggtgtagtgggccgggttgagccggatgacgcgaagcgtgacgtcgaggacgcgctcgctgtgctcctgcttggctgtcagggcgcgaaagtagtccatcgccttcttgtctgtgccgggaggaggaattgtcaggctgagctgctgcaggtcctctggctgtctcgtgcggcgagccaggacggaggaaacgacgcacagtcgggcgagtaaaggattgggacgagcgcgccctgggcttcgacctgctcgatcggttcgaggtcggcaaacaccgggtcctgcgagagtgagctgctgttcatagctgctgatgtcaagcgagaaggtagaaggaggggcaggatggtcgagagagagaggacgggtcgaggttcgagaatgaggtcgagggcgaggtcggccgggcttgtcctgctcagccaccgcgcgcgttgttacggtcactgccccttttcgtcacgctggtggcgtagacacctttgcttcaccaatccgactttacatcctgcccggaaggctgccctctccactgttgtgcaaactgacttatagcggtgcgcctcgtctagacaaaaggctctgaagaaaaggagaggatgcagtcgccctcgtcgggggtccgccaagttcgtcgcagcctgtatgctggatccgccgtttgccttcgcccgcacatgctcttttctactgtcctgcgagtgttcttctcattcctagcctagagccctttctcttctgcgacgagactatctgcaggtcggccggtcgttgcgagccggtttcgtcgaccctctgattcgtgcgttgctcgcgcgtgagccctcgtccgcccggctgcgcgccagaaaagtcgaaattgcacctgcgagccgcggcctcacacgccgcttgtgtcgagggagcgagagctcgtccttaccgcctgtccctttgccctgcccgactctcttctcgcaccctccttccctcagcagcagcagcagcagccggtcgcccgtcatgtccgacaagctcacgcgtatcgcgctcgtctcggccgacaagtgcaagccgaagaagtgcgtcccaacgctcggagcggccgctctcgaccaccggcgagacgccgtcatggccctgaccaccctgagctctaccctgccttgccctcctctctcacaaggtgccgtcaggtccgcacaacagccctctcgagttctactgcaccgggcgagccctctgactgacgttgccgccctcctcttgctgctctgggtcctcaggagtgcaagaagtgagcagctcggcctcgtcctcctgccggcgccggcacacccggctgacccaagcccttgcctcgtccttcgcccaggtcatgtcccgtcgtcaagatgggcaagctctgcatcgaggtcaagaccaccgacaagatcgctttcatttcggaggacctgtgcatcggctgtggtatttgctcgcgcaagtgcccgttcgaggccatcaccatcatcaacctgccgacgaacctcgagacgcaggtgacgcaccgttacacggccaactcgttcaagctgcaccggctgccgacaccgaggccgggccaggtcctcggtctcgtcggcacgaacggtatcggcaagagcacggcgctcaaggtcctcgccggcaagctcaagcccaacctcggccggtacgacgtgggtgcctctctcgcagtcgtctctgcttccccgaggccttgcactagacaactggctgacgctcgggccgactcacccgttctgccatgctacaggacccgcccgactggaccgacatcctcaagtacttccgcgggtccgagctccagaactactttaccaaggtgctggaagacaacctcaaggcgctcatcaagccgcagtatgtcgaccacatcccccgggcgatcaagggcgagcggaccgtgtcggagatgctcgacggcaaggccgagctcgccaacaaggacttcctcgtcaaaaacctcgacctcaaggaggtcctcgaccgcgacatcaagaagctgtcgggaggagagctccagcggttcgcgattgcgctgacggccatccaagcggccgacgtgtacgtagccaatgcctcgctgatcgaccagggctgttgctgatgcgagcgccgcacccctgcagctacatgtttgacgagccgtcctcgtaccttgacgtcaagcagcgtctcaacgcggcccgcgtcatccggtccgtcatcacgccgacggcctacatcatcgcggtcgagcatgacctgtcggtcctcgactacctgtccgactacatctgcgtcctctatggcaagccctcggcctacggcgtcgtcacgatgcccttctcggtccgcgagggcatcaacattttcctcgacggcatgatcccgaccgagaacctgcgcttccgggacgagagcctgacgttcaagattgccgagacggccgaggacatgacgatcgagcgcggccgcaagctgtcgtacccgacgatgaccaagacgatgggcggcttcaagctgaacgtccgcggcggcaagtttaccgactcggagatcatcgtcatgctcggcgagaacggtaccggcaagacgacgctcgtcaagctgctctcgggcaaggacacgcccgaccagaccgacctcgccaaccagctcggcttcaaggtctcgatgaagccccagatgctctcgcccaagttcgacggcaccgtccggatgctgctcatcaagcgcatcaagatggccttcctcctgcctcaattccaatcggacgtcatcaagccgatgcagctcgacaacatcatcgaccaggacgtcaagacgctctctggtggagagctccagcgtgtcgccctctgcctcgcgctcggcacgtcggccgacatctacctgatcgacgagccgtcagcgtacctcgactcggagcagcgtatcatcgccgctcgcgtcatcaagcgctttatcctccacgccaagaagacggccttcattgtcgagcacgacttcatcatgtcgacctgtgcgtcgccgcgctcccttatggcaggtgagaggacatcttcgctgacttgctttcacaccgaatggcagacctcgccgaccgcgtcatcgtctacgagggccagccctccgtcgaggcgacggcgtgcgagcccgagccgctcctgaccggcatgaaccgcttcctggcctcgctcgaggtgacgttccggcgggacccgaccaacttccggccgcgcatcaataagttcgactcgctcaaggacaaggagcagaagtcgcgcaacgcctacttgtctgttccttccttctctctgagcagccttaccctcttgctggcctcggctgacccatttcttccgcatttgcagcttcctcggcgactagacgtgcagccacggatagtctactgcgcgcctgcggcgcctgccgctcgcattgaccgccgcccgtgctgcggcaggcgacggggtaggggatgcgcgggcaatgagacggagttgagcgaggcgaacagagtggggcggcgggtgcgagactgcaacctacgcgagaggccctcccacagtagcccctgatcttaatgagaaaagcacctaatcttcatgaacgccatggtcatggcaagacagtggtgcttggcaccgggcgcgcgagggacggcgtagagcttggacaacgccgccttgggccaaggtccggcgcagccagaccgggagagactcgagtcttttgcagccccccttcgaggctagcggcccacgaaggcgctcgtcgcggcgactgaggcgtagacctcgcgtgccggacaaccgctgcgaagagggcgagggtgccgaccggcagcagactgtttgcgagccgtgccgagggccggcgagcaaacgcccgacaaggaggtgtaggccattcagacctttcggctgagccagccgctagcacctagcagcacggctccggctgtcgcccaccctgtgcggacaagaagactgcctttgaaggcaggcgagctggccgcagcgtcggccgtccaggcgagccacttgccgcttcgctcgtgccgagcggccccgagtttccgctcctcggccgctttccgcgcctggccgatcgcaagaccctctcgcacaacgggacgagagagggctggcgcatcagtcgcaatctcgtccgcatggtcggtgacggccggtgacggctggtcgacgtcgacggaggcgacgccgccgaaaaagtcggtcacgagcacttcgttcaggtcgtgtgggaagaggtcggtccggacgccgtgcgtcgagccgatccggtcccaagtaaaggtctcaaactgcgaggacagtggggtcagagtcaaggcgctgggccctagccggaggcagacgtacgagctctgcaaaggtcgcggtcgacgtcttgttgaccccctccataaactcgagcaggtgatgggtatacttgtcgatgacgtgcacgccaatatccgagtcggcgtgatgctgagaagaggtagcgtcgggtcaccgtcagcggtcatcgatgactggctgtcccgcagcggagcgcacgcaccgagaacgacttttggccgagcttcgaggaggcggcagcgagcacgttaggcgagtagatcttgccgtacagtgtctgtgcctcgcacgtgtcaaacatgagcagcatcttgttgtacctgcggaacgaggcaagactatgtcagctgctgcgctttgtctctccgcccgcctctactcgcagacggaccgcttcttttcgtgcatctgctcgaccgcgtcggcgacgtcaaacgcgctgatctcctcgttatcttggaacttgagaaactcgtcgccgccgtggccagtcatgtagacgaagacgttgctcttggcgtccgacatgaggcgctggctgcgcggcgtcgtcgccggttggcggcctgcggtcggatcgagaaggagcgcaagccgtcagtcagcaccgccagcgctttcgtccaagacagtactagtgacgcacctgtcaggaggcgcatgaaggactcgaccgagacctcgtatccgcggtagtcgacttcgatgttctcgccgtagaggtcgagctgccggtcggcgtttgcatagacggtcgccggaaacgagttgcgcggcgagcaggcaacatcatcggcgagcatcaggatgatctgcgagtcagggatgccaagtcgcttgaccgtccggtacatgccgagcgtgttggccatatgctggtggaaggtgggcgcaagatccgtctcgctttagcattggatcgccggctgagccgaggcgggcagctctgattgagcccagcagagacaagcagacacccactcggtagttgaacctggacggacgagaaggcagcagccaggtgaggcccagtcaggtcagcgacggatcatccgcgagcgacctgacgatgaccgccggatggagagcgcgcagagacgcaccagaaccgggaggtgcagaccaggacggcccaattgttagtatggtccgacaccgtcgtggccatgcaggccaagccgagcaggccgaccaaaaggagcgccctgaccgaggcgaggagagacggcatcgtcgacagcatggcggtcagcgggagccgacgcgccccgacctcgcgtcttctctcgatggcggggtcgctttcgacggtcactccggagcactccctttgacgactccaacgcccacctccagtcccagtctctctaattaccgcagccctctttcgtcgctcgtaatacggcggcgatgatcgtcgcacagctcttccggcggcttcggcacgccctatcgccaccggtcctgcttgtcgcgctcggcctcatcctcctggccgccctcggctcgtttcacctccagtcgccctcgtcctcctggatcggcagcgcgaccggtgaggatgatggctatggcctctgggaggtcgaggaagtcgatgtctcgtctggtgctgagccggctcctccgggcgcggttagaccgcatcccgccgggctcccaacgacaggcgaccctgcgaccaaggccggcgagcacaagatcaaaggcggcttcctcgaggtcgaccccagtgtcccggccacccagcatccgatcagccagctgatctcgaccgcaaaggccgcctgggaggccaaaaagcacgcttcgagcgggacgctgaaggcggccgtcaaagagtacaaacgccggcacggtggccgcaacccgcccaagggcttcgacaggtggtggacgttcgtcgtgtgggtccctttttcgccgcattagctcttggccagacgcgcctcttcgaccgggagctggggcttcagcgaggccggagtagggaaggaaggggcgtgctgcatcggcgcgcagcactcttcgcgtcgcaggggcaccgagcgacggctgacagccgacctggccaaccctttttctgcagcgacaacaatgtccagctgccagatgagtacgaccggatcatgaaggacctcgcgccctttcgcgggctcagtgcttcggccctcgtgcgttcatccgcctgcgatggccgtcagctcgtcgacgcgacctgactcgtaccccttcacccttgcgcctaacctgcagcgcaagcgactcaaacacctgcagagcatgcgcgatacgtttactctctcgcttcgcaatggcgagctcgccatgcactccgagacttttgacccgagcatcgtcggcgcccaggcgcgtgctcagggccagttcgacttcatcaaggacgtcgtcaaggacatccccaactttgacgccgtcttctcgatccacgagtgcgtgtctcgctctgccctcttaagacttgcgtgcaaagctgacgcccctttaccgtccctcgtgcgcgtcgcagcacgccgacgcagttcgtcagctacaaccacctgatggagcttcagcaggctgacgaggacggcgagcgtacgtcccgcccgcacactcgaggactcacgcagattattcaccgatctctcctttcgcagccttcgaggagggcgacgagggtgaccggtccttttcaaattggggaagcgcttgcccccgtgcgtactccctctcccactcgcgcccttggtgcgtcgctgacattggccttcaaatcggcagctggctcacctctgcatgagattcacgaggcgcaagcgcaagatccttcgagactcaacccgtcttacaaggatgccgaggcggtcaaaggcgccgacacgatcttcatgggctggaagccgcttcccgagttgaccgaggccgagctcgactatcggccgatgcatctcaaaggcggcaagaagagctttgtctggtcgcaggacggcatgatggatctctgtgcgaacgccgacctcgtcgagctccacggcgcgatgaacggcctccatccggtcgcgagcccaaagctgcagcccatcttcagtctcagcaagacgaacctccattcggacatcaccgtcatcccaatcgagcagtggggcgaagacccaggggcgaaagcctggaaggacaagacggagaacaagctgctttggcgcgggcgaaacaccggcggctacgcggccaagaacacgccctggcgctcggctcaccggcctcggatcgcgcatatggcgttcaacgaccttcaggatccggttgagatcctgcctccgccgacgtgggtcgcacctggcagcaagaagctcaaggacgtcctgctcgagcgaccgcacggcgagctcaaccgcgacctgctgaacgtcggcctcgcgtatgacccaatccagtgcagtcactcggacggcacgtgcgacgagatcaaggcagagctcaaattctccgacgccctaacgtttgaggaaggtgcgtgcacaacggcgcatcactgcggcgacccctgaggctgaccagtctcgcgcctcctgctccctgccagagacgaactaccgctacatcctcgatatgtgagccttctctttttcctcgatcacttctagaagcacaactgaccgattgcgacctctgtagtgacggcaacgcctggtccgcaaggtgagctacggatgcctgtgtcgcaccattccgccgagcggtcgcctgactgccccctctcgcaggttccaccggctgctcatctcgcgcgccgtcattgtcaagaactcggtcttcccagaatgtgcctctcgccaccgcgcctgcctgaaatgtctgatccgctgacgtgtccccgactttgcgccagggttcaacgaccgcatccagccttgggtccactttgtccctaccaagctcgactttgaggatctctacggtgcgactgcccgagtcctcggtgagaccatcggtcaaatctgatgctgaccgtctcatcctcgtgctcgacgccgccagacatcatgtcattcgtgcgtcagccgtcctctgcaacagcgcgtccccgcctgtgcccgctgacggattgtctttggcttctcagttccgcggcgatggaaagacgaaccctgggcaggaggccctggcacaagagattgccgagtctggccgccagtgggcgctgacgttctggcggcgcgaggatatgacggcctacatggtgcgcctcgtcctggcttctgttccgccgaatgcccgttgctgatcgtccgtcgccttcttctcgctggaccgcagttccgcctcgtaggtcgacctcagccccttgcctcgaatggttcgtgctgatcgcctgcgtgtctttcctctctgtccagtacctcgaatgggctcgactgctcgccgacgatcggagctcgatggatttcatcgtcaaggagtaaagcctccatctgttctcccgcttctcatcacgaccgccacggccgcccctcaagccttctccctccaccccccctcgctttttcgccttctaagttgcgctcccttcctctgcttccgtctcctcccctcgtctaactctcaaactcctcgcctcccgtccatagacccgcctttgtcattgcatgcccgttacaccctaaaagaacctcccatcgcatgccccgttgaaccctaatcctgaaggccttggcgtcacgacgacgatcagcaagaccgctcataactatgctgatgctttaaaagccagagctcgacgcgctgagatctgtcccgcactttcctacttgcttacgctccgtcgaaccgaatatgagtgctgatatatgttgttccgaaaacccaatgtgcataagatctttcgtacagtatttgaagtgctcattagcttgattgctttcactgcaaggccttgatcatcaacacgaatccgtacgaccggttgtctccctcagcaacacaagcgtgcatgttaaagtggagtgaaggcacgtgcttaaagacagtgtcaaatggcatctgcgttcgagccagattacattaaggaggaaaaacgaatgctttacggggcatcatcctgaaggatgccctcagcctggacttttgacggtcagtgaggctagaagccttcgtagtgcttgcggtgatcgcatccttagggctggccagtggctaatctttccatcctcaagagctagcgcatgattccttacacagtgtccatcagcatgttgaacttcgagatgaacgtgagaacggagcaagcgttgaccagtctagctttctcaggccttatatttaatcaacaaggcaggctcgccatcgaatcgttgtggtgaagtggtattcattggtgcttgccatccagcagattgcactaggccggggttcgattccccgcggcgataactctttttaccaaagcacaggtatcatctcgccttttgtcccaaagtagtaggtctcactcaagctgtacggcaagattggaggccggcgcggttcataccaaaggctgtttgcttgagaccaggtccagctgacgcctcttccggcaagtggccgtcagaaggtctaagagcttctcaaggaaatggagggcgattccgggacgcgctggacgggccccgtcttctaccctcgcgtgtaagcactgaggatgcggcaggccctgggccagaccgcgcttccggatcctaccactatcattccagtgtgcgcactagtgtggcgctggtacatgatttgagtgagatactggaatgaaccggctcggcggccgcgtagacgagcacaaaaatgcaaaaagtccggccgaccacgacgacctcctcgtcgagtatcacccgaggtccgggatccagcgcatctctttgcgcccagaccctcccgagaatcaccagtagcgcgtccgttttgagcgactcgcgtccaagcggttcgcgcccgagggcgtcgacccagccctcttccgccgcagaagccccttccaaggcaacggaaccctgtctacccgtttcccgggataggaggcgcggctgcctacatcccggctatcctcacctccgagtcggagaggaggatccagcagaggttgcacgagcaggccgacccgctcatctgcacgagcgagatgaagctccgctcggccaaggcccttaacgaatgcctggacaaaatcgccgacttatcctttggaactcgagtaaaccgttcttctgcagaccaaaacccggtgctcgcgcgagcgccaggtggggaataagagagggagtgcgcgctaacattgctggagtgacaagggagagagtcggcgccattccaatcccagccagcctcatctttattgcctcgcctgccatgttcctcgaccactgcccttggcaaccttggctgggcctagcaatgggatcctaacgtgcagcaaaactcctatgtcaacacattagcgacgccgccagtcagtacttgagtccagtgcgctcggtcctggccaatgtagcccaaattttgcgacctgagcgtactaagcttgctatacaacctgaacgatgtctctcaaggtcgcccctcggcctcggctgtttatgcttcgccttttggaccgctgccgccgccggttttatctgctccgcctcctgtggcgtcagagcttcgcccccagctggctgcctaccttaccgatggcgctcgctaccctttcgccgctgtgccccagccgatgcagccgcttaggcggcacccgaagcggcgtacgtttgtttcgggttgctccacgccagctgttgcaaagggagcggcaacatcagtcatatgtcgcggcgggctcgcacgcggaaagaagaagtcggccggcgactgcaggggagccaggcgaggtcgatggaaaagagggaccagcctcgtcaagctgccgttcatattgaaggcggccgcggacacctgcgcttggcctgacctgaccgtccaaagcttcgtctatgctcacaattatctcgttcaattttatgtggtaccagtaggtctacgggtgaatccgttacaaggcgtcgcccgcgctcaactgacatttcctttaccccgtccggcggctctgcgggccgaggtcgtcgagcagctcgagcttctggcacaagtacttgaacaacgtcttgccgtaatcaacctgatgcacgccaaactcgccttttcggtcatcggccaatctccggtcgttcctcgttgcaccgctctgggacggcaccaaacctacgcgctcaacggccttcacgccacggcgcctgagtacgtcgtccaaaaactgcgccaagggcgcgtagctttcatcctagctttcctggtcctctggcagacttgccggtcaacgacgcagctctcagcgcttagagaggacgacgtcgtcgtcagatacgaggcctaccgttgcgactcgctcgcgaagacttcgcgcaggctagcgcgcgcgcccctccggttgcggtcaaccgacccttttatcggcaagcatttccgtctcgcaccggcggcggacctcccggagacgagcagcccaggaagagcgccaccgtcaagtcgaaccgctctcaacattctggagcttctgcccttctatccttgtgatcgcgaccggcaatcgcggctcgatgactttcaacatcgacaacctgctggcggcgtaggagaggtgaaagcaccctaggagcaccagtttgcaagctcaagattgtcaagaccgaggtcggcctgccgtgggatttcactagacccctttttcttttcaaagctgcccctgagtgacgcttctcttctctgtgatcgcttaccgtctctcagcccgcgccttcccaagtttttgccgacgtcctcaccgaggccttcctttgagggcgctggctcgtcaggctcccaatcccagggaatcaagggccatgctctgctctatgatgggcgtacagagaccactgctagcaaggaatcaaggttccgcaactccagcagcatgtcggcctgcacattgttgccttgcttcggccatgctcgtcggcctcggacaagacttctccacggctgccctttcacgggtctggtctctcgtcggctgatattcgattgatagcgagctgaccccaagcttagctgcattgtatttactggccactcccaacgcttgcggctattgcggccgtgccggcacctgcaacacccgtatgcgcgtcggcggcagcaaaacgccctgctagcagacattttgtccggcccagagcgagcagtaataagtgccggctcggcggccgtgtcacggagctcggcgacgaccggagaacggaagagaagcagtccttggggttttcaggtcgcccaaggactgtgtcaagatgaatagcgttgtctaagacagcccggaaccgacgggttactagtgggccaaaggtaagcgtgagacgtcagctcagcacgacgaagccgctggcagtgttgcgctcgcgcccgtctcgacgtccggcggcgcctctccgtaagtacgattggggtgacaaggggcgggggacgaacaggttggcggcagagatagctatgtccggaaggacttgggcgccatcccaagataaggtaagaaacaggtcgtctgggtcgatcaggccggcaccggcccactccaagaggctcaagcgtcgtaaacatcgtcgatggcgacgtattctgactcaaatgcggcgcgagcattatgacgggcttggcgtcggttgtcgtagaggcggatagggtcaattagctgggcgaggagaggaagaccgagaaaaggtataaaagagcttgcacgcggcaactggtgggtcgttgggctggctgctgaaaccaaaagtctccgcgaaagcggcacgtctggtggtctttgtgaagcccgaccaacgcaagtatgaccttatgcacgtgtcaaagagacgagggctcaagctacgatcgtttgccgcgccatctccgccttgacctcgtaaacgtgagtatgttgacgccgctgccagtcagaactgcggccacgcgtcgctcgaagacgggattgggcgcccggatctggaagtcgacaacggcgggaagagtaacgtcattgtattcttcgttgggcataatggccggttcaacgtcctcgctgccgctgaaaacgccccagtcgtctcactgctgcccccccgtctacaagcttttgctgacatcgcgttcgttgacccgtcgctctcagacgccttcacctaccggtccatggctgagttgcgcttgccgccggagatcgatcagcgcctggcgctgcgcccggatcaaggagggcttggccagaaaaggccatccgcgatggtctcccagatgtccgagaagctcgcagtcgtgcgtcccacttcgcttcttctcatgccagcaggcgctccgttgctgacgacgcgtgctcacattccaaaacaagtctgacatacacgactgcttcaccgagcccgacgcatcctcgccattcatgtttaagatgcgtctcaccccctcaatgatccggtcacgcgtgcgtgaccatctagcgcgtctagcacgccctcccctggacggtcgcaagcgccgcgccactgttgccgagaccattcagagacggatcgctgcgatcacgaaggacggaagctctttggcaggaggccatgactgactgatcctgcatgcccttctggcagccctactctgtcaatcagtgggcgctgacgtcaattactgggccgaccccgattgctaggtgcgtgtcttcggctttgcggtcagcttgcgatggaaatgactgacgctgctcttccagcctgacgtcttgcatagcacgctcatctcgggaacagcagcaacaactgtatagagtagtcgcacggtagactaaagaccgactggttcggtagcgaccgcaaggtcgacctggctatgtggctgcgtctggctgtcgagaaggtttgtctgtttccctagttgctcttccgacgccgtgatcaatgctgacgctccttcctctttcgactccgattgtaccctcctgcctcagcgacaattctctcgaccgaggagctcgccgcccgcgcgcgcctgtttaagccttacctgactgacactcatgctctgatacctcctatgtatgggccgccagtcgcgggtccgcgttttgtccttccgcgtcaacgtcggcgcttacgcttcaccttcgactgaccgtcggaccttctttcgtcctgcttctgcccggcctacgctcggacggttcttttttgaagcacatctacctcatcctccggcgtttctccaaacggcctccaaatttctccctcctttcgctgccgacgaaacgtcatgcctctctggaccaaagacgagctcgaccttcccggacaaactctcggtcgacccttgtccgcagatttccaggcgaggctcgccgtctttgaggccttgaaggagaaactcggagcttgcctatgcggagcgcaacgcagctttggtcaagaagcacattgcggcaggtaagctctgcggcacccagtggcgcagctgagccccctcgcctgctctctctctctctcacccctttccctctctccttcctctccttctcgattctttgggaacttcttcacgcaacctgtcttcgacgcgtcggacctcttgattcgcacaatctatttctaacaagagtttatcccggacaagaggttgtcccagacgtttgtttccccggggtgtcgtgtgaggtcaaattcaattcacagccacattcactgcttctaccctcataaccagtgcaaactattatgacatgaagtgttcttttgcgcagaatccttcatcaatctgtggtcctgattcttgccttgtatcgccagatgcaagccggggccatcagagcttgcctgaatcatccgcttcctcaaatccctctaatgcgttactaaaaacgctctcaagacccctagctttccttgtcgcccagtccgtatactcagtcagttataccctgaccctgaaagggctaacaatcagagaggtcgaaaatgtgatggccgaccttgtcccttttcttttgctgtctagagagaaaacggatcgcagtgagacagatcattcgcgtttccttttatgtttgatccgcgaccgagtcagcagttcaacttacagtcaatgagtgcgcagcagaaatagcaagcctgatttcccagcagtgaacgccaagtgcgctgtacaaagcgacggatgagctaaggacctgtcatttgaagtccgttcgcgatgactgattgagatgcccactcacggcgtggagtctccagcatttgccgagacaagtggtcctcaaagccgtgcagacaccagtgtcaccatatcgcgtgcaaagattgatcaacttgctgattatctcattcgcatccgagaggctttgacaaatatcagcatgcatgtagtagcagagcaacatggctgcgggagtgaatagcgcaaactatgaagtttaccgtaggttctttcaagcggcgcgtggccttctttacctgttcagagctgagacgaagaaaaaaaaaacgtcctcatgaggtgaagggttagcgcgtgaaagcttttgcctgcagtgatactctgtagacaaaaacactggtccggcgctcactccgctgccaacaacacgcgtcgtttactcatgatacatgtgtgcgaccacgtcttttctcaatttgaacccatgcggcgtcagaaactttgtatctaaaccgccagcaggcaaagatgtgcgcgcgaatcgttaaaaccttttcaactgattgtgtggtcgcaaccgagtgataggccgcaacgaaaatatctcgaaactgaagcgtactacatcgagcgccgcatgatagtcttcccgtcaaatgttgtgtcctgccttcgatgaacagtcactagctcacgtctgtctgctgcctgcacgtcaaagtaagcagaaacatcatctttaattccgcggcattgacctggctactggttgtgctcgttggcctcaagttgctccgagcctactttggttccatcatccaacgtgaacagcggggaccaatttcctttacttcaagacgagcgagtatcttcaatcgatctaaaaagccttccttttgttggacacttcgaataccaaattgaagcagattgagaaagtgaacctaaagttaaagctcgcacggtctcaccggtcacaatcatggccggtgaagcaaaaggtgtcagtgcgtcgcaaagattgatctgagcaatgcctggatttgtggctgtggttacatagctcctccctccagaatagagtcgtccgttgagtcaattccgcagagcatgaactttaaaaccttcttgtattgtcttccacttccgccatccaccggaagcgtcacgaagctagaagtttggcaccctggcccaagtttcttacttgcaatcccagcgcttatgctgctcttcacatctacttacttcaacagagcgcaccatggcctctcagagatggtctcctcttgatgatgggagttgagaaagtgccgttcgcccgcctccaattctctgtcggcctagttctaatgctgacacatctttctttgacgtagcttacattttggtcttgcggtagcatggagtggacactgaaggatttcagaagctgccccatgtctcacgtcgctgtcagatgaaccggcgtccactcgaaacagcagcgtatgtccgctgtttagctagtctgtcctttggctcccaaatatttattgtccaggcgcgctactaatttttgctatgccccgccgtcgtttttttttgccgcacggaatgattgacaccgaagcgcgctcggaccagaaccacgtcagtcacgttgtccatgaccgtcgtcactgacactctctcctttctgacctgtttgtcatgtgacgtccgtcggaatcacgacttcaagcgcatctgttttgcccaggcgacaaaggaggaaacaaagtagcgggctaaagccaagacgtgggcaaaaaagcgtggcaagaagactccagatgaggaggaggaacctggggagagcgatgaggggactgggccttggtcgccagccaatctaacaccagctcgctcgttacgcgccggcgtcacaattcgatctcttcggaggcaacaatgacccgccgccgaaggctccgcgccggccggccggcagggggtgcggcctatccctctccgggaccgatccagcttcatacagtcggataagtgtgagcgtctcccatcaacgcgcagagtgccccgagctgacactgcgctcatgcgtcagtctttcgtgccggccttcgaacggattctttgctccgcaaatgccagacttaagcggcaacaacacttgcagcaggactgccacctctccggtagccagcgtccggtcggtaagctttgccgaagacgttcagatggtggacgatctgggcttttcaccttccagcagcaacatcgacgtttggaagcgaccgtctgtgcccttatggtcttcaacgcctccgtacactacttctctccccgtcatcctctgttgcagcgcagctttgggcctctgtctttgctgacagcttagttcttccctcttcatgccgtccgcctgtgctgccagcgagagacaaaccgcacaagacatgcgacgccagctaggtcgcgctcggtttgacggcttgtgcgcgttcaagacagcggtcgtgacctgccggcgcgcacgcttgacgcacagcaggcctgcattcattaaaacggcgaccgaccacatagccaacggcaagatcgacgcaagatttgcggaggcaggtggcccgcgcttgttccgctcaacagccgtctcccttggtcggcgccttcgataccggcttatcggctgcattcacccggcgagtagaccgtcctgagttagtttctcccgatccgcttgcctcgatccacatctcactgactgtctctctctcttctcttgcactctccactcttcaaatttccatcgctaggggcgagagcgttcctcacagcagcagctgtctccccgagcgtcgggacctcggcgctagggcgtgtgggaggaggctgtggaggcggtgataggaacgcgtctgggaggtgttaaaacaatgaggttgtgctcgtcgttgcggacaacggcggcctgcgtttttgtcgtcttctcgcgctcttggacgactccgacaccctcgggtgctctgacgcagtcgagctaagtggtgacgaggttgagctcgcgctgttgggaatgccagtgagaatcagcacgtgtgtgcatcaagagcacgagagaagggcgcacgaccggcttgaagagggttttgtggtgcgaaggccggtacagaggcatgttgtaggcgtccggcgagcctgccgatctgcagtccagagcacgacgctgccgtgcccggaatgccgggagatgaggtcgatatgagcaagtacatccgctgcgccgggagcttcagcccggagacagccggcgaaagaactgggtttcaaaacgtcgcccgaaagcgtcaaaaacttggcgcgcgagtgcaaaatctcggagagaccggcacgtacggcaacggcctcctcgagacgttctggtagcgcggcctcgtcatgactcaacgagagaccggaagcgtgtactttcagtcggtcgcacctgcggcatgcgcttgcgcgaggtcaagagccactgacaagccaaaaaggcgagctatgagcggatcggcgttacttccaattgaaagcggcggcgacaaagagcccagcggaggcgggattgagcggaaggagaaacgtttgtggacggcatgctgcatttgaggcgtcgggtgtccgggcgagtaatgctggggtagtgaaggcttcccggcgatgtcacggttgatcttgccctaatcgaacgtcgacgtcaagggcacgtctgcagggcagcgatctcgccgcactttcacctaccaccaccacctgtcgtcaacccggatccgcttgatcgcttgcctcgaaggccgctccctcttccttcgaaagctgcggctaggtctcgacacgactcgcgaggtcaaccaagatcaactttatcttcagttggcgatcgagacacacatgtttgtttgcctttgacaacgaacgggcccgtgaccccgctttctctatcgaggaggccgccttcgccgtcgaacgcggcaggtcttatttgcggagcgcgcagaggctcagcgcgatagagaccgtgtcggcgaccagggaacgaggggcgatcggctgcagaccacgcgccctatcgagtcaacaagggctggcgcaggagggacgcccaggtgaaggccgcgcacgctgctcgcgacgcgctgttggctaagcaagagctcgaatttgcctgacatgggcatagatctgcggcacggcagcgaaaaggtcagctcagcagactgattgccggtgccagaggggagagaggagctgaagacgcaccagaactgcgacgcgcgcatgaaggcctccacctggagggcctccaactccataagcttcttctcgagctcgtgcgccgctcccttctgtcttcggccctcttccttactagttgagcctgagctcggcgcgtccttgccaaggttggcctggatttatcttttgcgcctggcctgcttctgctcgaaacaccgacggcgctgctttccagcacgctcgtcggcctcccggcgctggtctccgaaggtgtgggtcgcaacttagaccgtaccggaagcctttgcgctcttggtcggtcgaggagtggtctcctcgctgctggccgatccgtaggtctgctgacaaaaggttgaccttgcgtttctggcccgagacgagaggcttgtcgacgccgtcacctgtcaaaccaacgccgtcgtcatcgtcgccgctgtcactggaaacgaccaaggtcgcctgcgactgcgtctgcagcggcacctgaggcttgatgtacctctgttgagggataagtggcgagcgggggggaggctggagctctgacgggcaaggacgagtgattgggggaacgaagaggcaagcttgagattcaagtggcgactcaaggtttacaggggattaagtaggctggagtgtggcggcaaagaattttctggaaggctggaggacgaccagcggctgagggttgcggggtctagactcggccggcggcgacccggtgtcgcgctcgaggtggcacgtggaagttgtcaaccggcgacgggtggggaactgatagtgcttgacttctcctttgccgtgtgggctgacgccctgggttcgaacccgaagccggggatctgcttttcctggcagggtccaaccatgataccctcgccctcggctcgacttcggaatgagtgctagctggacgacgtcggctcgatgaaaggtggaagcgatcgacgtaggcattgaggtcagaccaggctctgctggtggagacggcgacgaagagatcgggcgaggcggcagcccttcggtcgcggcgccgccgttgtcggctgggctcggcgagaccgcttcagagtcagacgcagctgcagcagcgttgccgccgactccagaaaaaggcaatggtcatgtgagcaaaggagggatcgaggtcgcactcaaacgcacatctttggaggatggacaagtcggtcacggtgttgccatcggcgcgccctccctccttggcgtgggctcactcgaaaagcagagcgtaaagcagaaagaaccaaggcaggtttttcttgacagctgctcggagtgagtcagaaagccaggaggcccgagccggtcacttgaaggccgaaaggagcaaagcctaacggcccgtgccaagagcggagctgcgcacgcacgccagttttcctgcgtccgactgccgtcggcaaagatgtgctcggaggtgcagcctccgccagagcccgcgataccaagcacgttgcgcggcttgtagtaggcgttcttgcgcctgcccagcgacagtggtggggagagccaacggaggcgcaagttagctcgtctgcaggggaggagcttgatcgagtcgacggatcacgcaccagctgagcctgttcgggaccgacttggcgtagtgctttacgcccgtggcgccgaccttcggcgtcgctggcggatcagagtcgtagttatgacagtagaagatgaagacggggtcacgagcgaggacggcccgagcgatctgctcagcgtagacgatctctgatgtcttgccaatcggtcatactgaggaggcgccaagaagaggtgaggggtggtgggaggcgaagggacttgtatgacgagacaggaggtagggccgactacggtgagggtgagctactaccttggctaagggggctaaggatgggtggagcgagcataccgcactctcaagactactcaatccgtgaacgactaaggtacaggaggggaagcgagcgggcgtctagcgaagaggggggagcgaaaagagagaggaggaaagagtccggcggactctagggcgtggtgcccgggtggccgctgggcggtcgccaggcgctggcggcgcgcccaggtgcccgcgctgcgccctgccggcgccgacgcagcaacaccttcaaaactctcaagaacgggctgcctgttgcggttcttctcagtccccccagccgctcgcctccatgttcgaagctaacgagctcacggccttcgaggcctccaaacgaccgactacgtagagtacattttgtgcaggtcggcctcctcttctacggcgatgcgcacaactgattgcagacttgaccctcgctcgtagcgctcgacattgccaacagccccaacggcgacccaactctcaagccgcttcagtgggtccgaggcctctaccgtggtgacccggtcgcggagctcgccaaggattacgacaatattctcagcatgccgctgaagaacgagtaggatctcctggacatcttcacgtgcgactttttccttctcacgggcgctctgatgctagacgatcctcactgactgaccttcgttgctcaccgcgtagggacgtcagccagcacaagcgcgctgaggcgatgctcgggcagcttcttgccataaaagtttttggccgccgacctcctcaagcgtcaggaaaaagatttccatttttatgactggctcttcgagacctcggcgggagggctcacgccgtggcacaccgacgccgcggggtcatgcatatggctcgaaatcctgtcgggcatcaagctctggatctttgaagtcaacaacgtcatcgactcagtgtcatggttctaggttcagcgagtctacgagtcacaacttcaagggtatataggtccggaactggcgcttctgtcagaagcgtcattgtggtcttttggcctagtggtatcgcgttggttggcgcggttgtaacactccgtctggcttcaccgtgtatacggtctgcgcggcggtgaacattctttcagcctttgcggcacgggtgacgctctcgaccagcggcttattgaggccagatatcacaacgtctccaaagagaccgtcaccgggactttcagtccttttttctcgctcaacgttgttctggccgacgacaacacccgcgagtcgctgtacatgatgagtgcgtattacttcgttgcgcttcttgtgctgctcagtggtgaccgaacaaaggaggctgaccctgaccgtgatggctcctctacaccacggacgacctgatacatgcctgacattcccggcagatgtactggtagcataccagggaccgtattggtagcctaccagtaggccgatcaatatgctaccagtatgcatatcatgatgttaccagtatgttttcagcttttctcgcccgtttgacaaactgaccctcagaacccttcctcatgccgcgctgactacactgaccgagtctcgctgacatccgctttgttctgccctcaggtgaggctgtaaaaggtgggcggaaccctactggtatgataccagtatacactagtaccacccctcagaacaaaacggatgtcagcgaaacttggtcagcgtagccagcgaatttcagaagagttcggagcagttgatttgataaacgggctattgtctgcgcgtcagccatcgacgaggagcttgcgcaccggcggctcggccacgtaggtattggtcgagttcgtcagacggcggcccaggttgacggcttcgagctgacgccgaaggagatgtcagcatgcgacgcctgcgtcgagggcaagatgacgagacgcagcttcacggtggcgtaggtcgctcagggagcgagccgaccaggcgacgtggtctcagcggacctctttggccccttgccggcgacggcaagcggctatcgatatggccttgtcatcattgacgacgcctcttcccttatcaagctttacctcctcaagaagaaaaacgaatctttggcctgcttcgagcggtccatcgcagaggcaaagacggtcggccatcgcgtccgtttcctacggtcggacaacggtggcgagtttgtcagcacggcgttcgactcgtacttggccgacaaaggcatcgagcgggccctcacctcgccgcaaacgcctgagcagaatcattctgccgagcgtgccgtacggacaatcaaggaaggcatgcggacggcgcttctccgggctgggctcggtcggtcgttctggggcagggccgctcggtcattcgtctatactcggaaccgctcggttgtcaaaggtcgcgttcctctggaggcttggtcagggcagaaggcgagcgtcagctccctgcgggtctagggttgcctcgcctgggtccacgaaccggcagctgaccggccgagttccctctcgccgaaggctgtccgcggcatcttcgtcggctacggcggagaccagggcggcgcggtctcgtcctggtgcatgtgaatgccttcccaagaggccgagtccggaggcggcgagggagacgattttggattccggaggtcgccaaaccccccgcggaaacgaccgagctgaccctccgaaggcctccggcgaagtcctctccgaggatgaaatagttgcaaacgaacgatcgttaggcgatgctgcgggccggtcggaaggccctggcactacaagtgggatctcggtcgaaggccagagaggtcaggttgtcgtcgcacggcgcaacccaacacggtcgcggcagaggcccgcacgctatcggacggaccaggcaggccttctcgcggtcgacgacgtagtcgacgaaggaggagagaggttgaaggtcgtcgacaggcggtcggaaggtggggtgggtgtcggcggggaaccgtcaacggccatcctgcaggcccttttcgccggggccgaacacgcacagccggtcagcttcaacggcccatgcgtagcagctttcgtcatggccctcgcagcagctcaccaggcgggtgtaccagagcgactgaccgaggcgctgcgcgggccgaacggccccgtctggagggtaagagccgaacttgagatggcgtcgctgcacaagcacaaggtctggacgctggtgcccaggccgagggcgtcaacatcgtcggctgccgagacgtgctcgcggagaagaaggacgcacaaggagtgacggtttgctataaggtccggttcgtcgcgcagggctttagtcaggtcgaaggcaaggactacttcgcggacgagacgttctcgccagtggtcaaactcacaacgcttcggctgctgctcgctgaggcagcctcctgcgactgggaggtccaccagatggacgtcgagacggcctatttgtacggcgaactgcaggaggaggtgtacatgcgtcagcccccttggattcgaggagctgggcaaggaggactgggtctgccgcctgcacgagggcctctacggcctcaagcaggcggccaggcagtgatacctcaggctgcatgaggcactcacggcgatcggtttcgagcggtcgacagcggaccagggcctctactcgctccggtagggggggggagaggagctgcacctcgccgtctacgtcgacgacttcgggctcttcgcgtcgggcgtcaagatcctgagcgagttcaaggcgcggatcgcatcagcattcacggtcaaggatctgggcgagatgcgcttccgcctcagcattgaggtcgtgcgcgacaggccgcgaagaacgctccaggtctcccagtagccctacattgagtacctcgccgccaagtaccacatgacgtcgccccaccaggtggtcgtcccgctcgaccccagcctggtcctgaggaaggctcagagcccacagacgatcgaggaaaggagggagatgtcgggcgtaccttacgcccaactgctgggtggcctgctgtgggtgatgctggtcacccggcccgacctctcctttgccgtcgtccggctggcccattcgcggcctgccctggcaagacgcattggtcagcgctgaagagggtcctcgcttacctcgtgacgacgaaggaatgggcgctgacctacggcgcgggcgggagaaacgggtcgacgttggaggtctactcggacgcggactacgcctcggcagatatcgatggccgccgctcacacagcgcttacgtctccatgtattgaaattgcgacgagtgcgggccggcgcgcagagccagcggcggcagcaggcggctgcgcgcgcgctggcggacgcgcgcctgccgatccactcctgacgcgcggactgcatcggcgtttcctcatctgttccctcttcctcttaactttttcccttcctccccttccgtagagaccttagtccacttcctgaggtcagtcccacctttcgcctttttgctcaccgcttgtaacacctccaggtagctcattccgtttcgtccttcgctcaacaggtgcctcacgacgccatcctcgtcagacgtccctccccggcctcgtactccaagctcttgtcgctcgcccaatcgggttgactacacttcttcgacgcagacggaggaccgcatcgggggcgaaagaggaggctgacctgctcggccacgtcatccgcacagtagcgccgctgatgagcggcgcgctctggtgcaaagctgacatgcagaccagaccacccccgaggcgcagagggttgcttgaattcaagctggcgtgggcccggccggagtcaacacgcatggccgaggccgactccggccgccctgtcgggccattagtttcacagtcctctttgtgaaggtcattttgtacggcaaactcagggttcagcgagggacgtcggactacagggtgatccgctttggacagacctagtcctccctcccggcatgacgcacgccgtctacgtaccgacgccgacgccgacgccgacggtcgtgtatgattcatcctggcaagtagccggatatgggaggggaagagggaaggcgaagggggcggagatgaagcgagagagatgcgctggtgcccgcaataaataacgccaaggcatgcgcgcgaggcatctctgtagggtcgcggcgtgtgacgtacgaatgcatcgagctgtcgcccgcctaccacttccttccgaccatgccccccttcgcccgtctccgttgcccgactcgaaagatcacggccgagatgcaggtcagccccatcgctctgtgaccgttcaatggacacgttgccctgccggtcgcctgacgctcgtggttagcgtgctgccgaggtgctctttctggggacgagctcgggcggcgggccgagccggaaccgcaactgctcgtcgctgtcgctcacccagcacggccggacgagctgtcagtcgagcaggagctggccaattgtccaaagaaggagagctgacctggcttcttctcatgcgttcgcagtggtcgacgccgcagacggcacgttcggccagatgctccgcttcggcctcaagccgtcggccattgacaatgtctttgtgacgcacctgcacggttcgtcctgtgcagagagcagagcagagctgcctagacccgcgtctgcgagctctggatgcaagctggcgcccccttctgtaaaacgtctgacttcgagctcgtcgtttcctgccccgcgcagctgaccacatcctcggtctacccgccgtgctcatcaagacgctgcccggctttgacgtctcgcccgagctgcaggcccggttcgcagcgcgcgacccatctcttcaagtgcgtcttgctgtgatgcaagccaggacctgcgccgagctgacggttcttcctctcgccttaccttcgtcgaccagccttcggtccaggtgttcggcccgtctggcctccgccgcttcctccggaccgccttcgaagtgacgcaagtgcagcttggtggcatgtacgcggttcatgagctgctcgctccgggcgacacgccgacgagttgcgcgccggccgatcggcacctcaacgagtcgcccggacgcgacattcgccctgacccgcaaggcctctggaccgaccttctcgaccagcctgtgtccccgtttcgcggtccttctggcgcgctgcaagtctcggccggtccgatcttgcatcgcgtccccagcgtcggctacaccttctccttcccaccctcggctcgacctttgcctccgtcctacgcaccggcgttgaaagggcacgggctgccgatgtcgctgctcggccggctcatccagacgggcgagctgatcgagctcccggacgggactgagctcgttcaccctggctggcatgaaggtccgcgcatcgcggtcttgggtgacacgagcgacgccagcgggatggcccccttggcacaggacgtcgacctgtacgtctcacggtggcgaggcttgcgccctacgtctgctgacatccttctcacactgctcgtcctgcgaaggcttatccatgaggccaccaacgctcacttgcccaagccgaccgacgaccctgctcagttcaaggcaaaggccgatgcggtacgcatcaagtcggccgggcggggccactcgacaccagacgtggccgggacgtttgcccgctccgtcaacgctcgcaacctcgttttaaatgtgcgttgcctcgtctgcgtccttgctctgccagcccagcgctgacagcccgcgctcccctctgcagcatttctcgaccatgttctttcggtccgagcaagtcgaggctgttgccgagcaggctcgcgaggcattcaagggcgtcgacaggaggtcgagtcgggtctttcacgcacaggacggtttgcggctgctcgttgaggccggagggaccatctcgatcgcacccgatttggatcgatgactctcaacaaggctcagtcatgtcgcttgctgctcgagcatgctcatcacacgccgccggtctcagtcgaccccgcgtcactctcagcgtaagattttaggacctcggccgtgctgtcctcgtcgtcggcgtccctgtcggatgcgcttcaagacgcgcgctcgtgcggtcgggcggacgaggccgattgactaggctgcttaggaagggccgccgctcgcctcgacttgcgtgggtggcgaacgagggccgagcgggctcgcgggcgagccgagagactaggtgcgggcgtgctgcgaggagccgttggtggccaactgcagtcgctcgagcgagagacgttctgtgacggaactcgccgagccggcagtgacatgtcggtcatagatcggatcgtcgtccgccagggtccagctgcgatgggagccggcggaaggcaggccatgaacgagagaggctgtgtaggaggcttcagagggggcgagacggaaggtcagcgtgagtgaaggcgaaggggatgtgcatgagccagcgtttggacaaaccggtgcgagctcaacgtcgccgagagacttggtcgccagcgcggcgtaactaaggcgcccgtccgacctttcttgcggccaacggcccttgtcctgcggcagaacgcccaggaggacggcacaggtagttggccgcaggtgcggcgggtccgagggcatgcctgggagcaggcgctgacaaggctcctggtcagcattctgcaagtctcgagctctcgcttcagacgacgcacctcttgctgccagtcagcgatgcgctgagatctcgacgatcggctcgagagagtcggcgcgcgtgtcaagcagcgacgcgaaggctgctagccgagaacagcgtcgaaggtgcccatcgtcagccgtggtcaggcggaggctgcagagcggaagccaaatcagacacgcacgtcgcttgcccggtgctcatcatgtccatttgaggtccggttgggatgatcttgagagttgtcagccgtgctgtgtcgagggctggtgctgaagatggtcgtcggtgcactcgttcctgacgagcctcggcagcctctagcgtcgttggccgtcggcggaagcttcgaccaccgaccacgacctcgagcagccccgaccgaaacttacactcaatctcaaggccgccaggactgtgctagctactgtgagtcatgcctgtgacgagtactggtcgtggggaagccgctgacggacgtgcacctcgccgtcggccatgacgtcgtagctccccccgttcgaccctccctccgtctgtcgcctcaccgcccttgaatggcgaacccgctgtgggccgacagcttgtcggacgacaataacccctgggaggatgcgtcggacatcagacggcctagtgcggaagccggaccgtccgaccgggatgctttcggctcggcctcgcctgacgaccagctgccctcgccgtcaacagaggcgcctgcaccttctcgcctgccgccgatagagctcgacgaggacgcactcagaagtccggaaggcttcggcagcttccagattgacggcgccattattgccgtcctcctggtcgacttcaatcatgcggtgcgccaagctcctctgctcctcatcgtcgatccgcagtcgcccgtccacgcacgaaccctgcctactcacggcgccgtgcccaccttggatgcgctaagccaagtaaacgccagctgacgactggctctgccttcctgccttcagctcggtccgatcgtcaagttctcgcatccgccagacatcctcggctcaccgctcgtcgacccagagatcccgcgcctgctgcccttccttgccctgccggacggcgcccatctgtcggacgaggactactcgtattttcacgtcgtctcgtcgccgccaaagtcagaatcgcaggagacgctcgaccaggcgccgttcccgagcaacaagacggtattcggcatttcgtgcgtccgggcggttggcagtgggcgcaggcagaccgaggcggctgactcccgtctttgcatcggccatctcgcatagatgcaaccggcagctcgcagcagcagacctaatcaaccggccggcagatgtcacgcggtcgacggtccagatggccgtcgtcgtcctcgctcgccagccagtctttggcccgatccgcgacaagctcggcctcatcacgcgcaccttctttgctcagcgcgactttacagagacctcgatcctcgtcgacttttactcgtcgctccagctgtcgatgcgcggcgccatttctgagacgacgttccacatgggcacgagcttacgcgagctcatccacaagtttcgcggcaagacgctcgtcctactcaagctgctgcttctccagaagcggctcatgttcttcggctacccagtcgaggcgctctgcacgttccagtactctcttgtgcgtctctcgccgcctgccatccctttcgctgccctatctgacctcgtctttgttctatgctgcagatttcactgatacctggtgcgcatccacccccgagaccgccgtgccaccgtctcgcgcactgctgatgctcgagcccctcaccaggcctgctcatgaacctctcggactgcggctcgcccatcctcgacatccgtgcggccactaaccggcgggcaagctcgctgcggacgtctgaccgggcttcgctcctccgcttctttggcttcccgctcaatctctttggcaaggcgcgtccgccagcagtcgtcgagctgtgtcttgcaaggatgctgacggtctaagtctgcttccttgctcgtctaccaggacgccttcttccagccgtacctgccgctccagcagatcgacatgtgcagagaggcctcgtcatgggtcgtcgggacgacaaaccaagtcatgctccagcagcggtacgtcctgagccgcgtttgctgtctcataaaccttgttcctgacgattgctttcctaacgacacagggatgctgcctacgactgcctcatcaacgtgagtgtgaccagccacctgtgttccccttgacagcgtctgatgctgaacgccatcgcgtgctttctcagatcgagcagacgtccctcgagttcaaggaccccaagctcgagcgcgtcgtcacactgacaccagccgaccgcaaggtgcgtcgctgtcgcgaagagccgcgcagcgcgtgctgataactcttgctccggttcgtcagtggatggacgaggtcgtcaaggcggtcgacgagacgtggaatccggatgacccgtcgcggccagccaacatgtcgtttcgcggcagcgatgacttcctccgagccaaggtgcgccgctgcagccgctgagagcaacgctcggccgttgtactgaccctgctcccgccgacgccgtcagttcgaggagtacctgtgctcggctctctgtgcgtttgcgggactgcacccggccgtacgacctcgctccttgctgaccgtgctgccttctctcaccagcctctgttaaatacgccgactttctcgccaaggccggcaaggcagacatcacaatgacgggtgtgcgaggtgagtcgttcgagcagccgcgctctcccagcgcactcgctgaccttgaccccagcagcatccaacacggctgccaatttttcgctggcatgggtcggcgagctgcggaagacgccagcgttccagcagtgggaccggtcgaccgacccggtgctgtttgacatctgggagccggtgcatccgacgcccgacacaaaccccgtcgccgacattggtcttcggctcaaggagggcgtccaggaccttcagctcgagaagaatctcgggccgacgcgcgacgcgctctcttcggccctctcggccgggtcgacaagtctgttcaaggcgttcgactatgtccggagctcggcttcgcgggggaattgatgtcgcgcaatgctgaaaacaatacatgcgataccctggcagacagaccccactagaactggatcttctggtcctgtagggaagggtgcgggagcgcgaggcgccgtcagcacagggtcgattgggtctagacggaacgtcaaagaacgtacgagctcggtgacctcctggagcagctcgtcccatccctccttccagtcggcgttcttgccgtcgtcggccgcgccggctttgctcttgcgctgggcctcgcagatcaggacgcacgacgtcgcccgcttggtgccggcagcctggccaagctcctcccttcaggtcgaacggaagcagtctgtcagccctcatgtctgcggctggcggcgcaaagcgcgtggggactgacttggcgagcacccagcagtacttgacgccggcctcctcggcgaggacgggcaggtgcgagagaatgtcgatcggggtgatgttggaggcgagcagcaggagacccttctcgcccttgcggagcgacttgacgacctccttgacaccccgcttgagctgccgagccttcgatgctgtgagaaagcaagaccaccagaggctttagctgcgaggctcgccagagaaggagaaggaagggcaggcaggctcacccttcttgaccgtcttgaacagcttcttgctcagcttcttgccggccagcggagcagcgatcggagcaatggcgtcgacagggacgtggaactcctccttctccgacttttccttcttggccttcttggactgaagagggaaggggcgagcaaaggcgaaaggtcagggcttccttcctctcggaggcagctgggctgagcacgacgagcttccggacgaccaacctcggtctcctcgacggcggcggcgtcctcgcctccgagcgacttgcgcttcttcgagatcttctcctcagacttggccatggctgctgttaggttgggtggagggtgaggaaggggtgggtgagggtatggcggcccgtcttctcgtcgaccctctggctcgcctgtcctgctgcgagccttcgtcccgcggcgccgcgagaagaattcgaaaagccccgcgcgcccgcgcagtcgaccctcggacctcgacctgtcgctcctcgctcgagccatcgtcgcacgattgctcaaaacccgtcatcctacccttcctacgctcaaatcgcagcatgtctgagcccacgcccttcttaccctcctttgccaaggccgacgttgaacgcatgatggagaaggtccggacacaccgcctcccgccaggccctgtcctccccggcacgagctgggagtacgggacagacaacagctggctctcagagctctgcgccgagtggaaggagcgctggtcgtacgaaaattttgagaagcagctcaacaggtgagctgtacgagtgtccggcgaggatgtctctccgcaccgggctgaccctcgctccgtcggccgccgcctcatcgcagcttcaagcactttcgggccgacgtcgacggctcatccatccacttcatccacgcccagtcgccccggccggatgcgatacctctgatgcttatccatggttggccgagcagcttcctagagttcgcatcggtgatcaacgctctcgcgaacccgccgaccgggacagctgcgtgcggccgggtctcgcccgcagctcgcaccgttgctgactcgcttctggcctcagcttccacgtcgtcgtaccttcgcttccgggctttgggttctcggagcctccgaagcggccgcagacgtcaaaagacgtcgcacggctgttcaacggactgatggtccagtcgctcggctacggtgtgtcgccctcgagggctggctgctccgctgatcgatgcccgcgcgctgaccttccatcaccttgccctggaaagacgagtatgcgacgtcggccggagattggggcaccgccgtctcgcagcagctgctcttcctcttccctgagcacgctaaggctgggcagttcacgatgctcatcgcccggccgccctgcctgtctttctctacgccgctcgccctcctctcgctcgctcccctgccccgcagcatcatcacctacctccaaagtttcgccctcgacgcctttgagcggtctggcctcgagcggtcgctcgccttctggaacgcgggcagcggctaccaggcaattcagggcacgaggccagggacgatcggccaggcgctgtttgacaaccccgtcgggatcctcgcttggattggcgagaagtaccgcgagtggtcggaccctaacgcgccggcattgtcatcacggatgacgtcgacccacatcctcgatcaggttggtcccccgactgagctcgtccttctggcatcaccctctgacgctgttccctttccaggttgccctctaccatctgacgagcacgattcacacctcctgcctgccctacaaggactacggcggcgcctccaacgaccgcggctaccggacgtcacttccaaagtcgacgccggtcggctacagcgcctacccgttcgagatcctgtccgttcccgcgtgagctgaccttcttttgacaaacggtcactgacgagcccttcgcctgctccctgcagccagatgcccagagccttcctcgaggcatcgtacaatctcgtccagtacaagcgacacacctctggcgggtcagtcaggagcgacgtccttctgttcgacctgccggcgagcgctgacccttgacacctacctctctctgcgccgatgagcagccacttcgccgccatcgatcaccctgcagcatatctcgcggacgtccgatcgatgtttggggcccatttcccgcgagcttgatctggcaaccaaccctggctcggctgtgcctacccttcacccttgttgtctcctcctttccgaacaccatcgcttgctctccttaaatatctctccaatgtgccgctttgactccgtcaacagccgagagcgcatcatctgctagccgtcgaccgcccttcatcgcgagtccaatggctctctgctattacagacgacgagatgctcgcgcgcaaaaggatgacatggcatgaccacgagcggccgagcggcggggcgtaagaagcggcgggctagggctacaggatggggcgtgtgtatggaccagggctagatggaagagagcttcgtgacggcgggcgagggatgggcttcagccgcgacgaagcagtgaaaacggaggagggtttaggaggtagacgagagcgagggttggtgccgcgtcgccgctttagatggtggtcttgacatagtcgtcgacgggggccgacgaggtggccgacgacgagccggcggccgactggcgggcgatgggcgcgagcttcttgacaaagacgggccggatgacgtggtcgtagagcttggcggcgccgcgggtcgacggcagctgcaggtagacgagtgcgaggctcttaatgacgaaccagtaagggacgaagtagatgaggccgcggagggcgatcgactcgagcagcgtaaaggacgaaaaggcgacccagtacgtgagccagtgcttgtcgtcggtcgggctcgagctctcgagcgcctggatcgacagccaggccgggacggcaaagccgacgaggttggtcaccgcgggtgcgaggttgaggacgttgaagtagatcgagatgaagaagctgcagaggagacggcagagggttgattagcgaggggcgagatgagcaggcagccgcgggcgggcaaacgcgaagagagacgcacgtcgtggcgaggacgatgaaggccgtcgtcttgggaactttggtccgggcctcaaagtcgcgggcaaaggcgttcttctcgagctccttgtctgggaggccagatgggaaaatcggtcaacaaagggtcgttggaagccggtgggtggcacgcgagcaaggaaagggaccgacccagaatgttcatctgcctctgaacggagttgatcgatgactggacgacggggtggccggcgaccttgtggccggccgactgagctttgtcggcagcggcgcgggtgcgcgtctcggcggcggcggcgtggacgtcatgggcggaggtcgaggcggacatgactggctggagggagggaaggcaagacgagatgggcggcagaagggatcgacgaaggcaggcgagggcagtcagcgacctagtcgtgcagtgcttgtatcgtcgctgcaatactcgagactgacctgagtgtagtgaggagtagggtcgagtgagaacgggagagagagagacggtgtagatggcgttggtcgggagagacgggacgagggcaggccaaagccttttgagctcgcgcgcgccggcaaacgcccggcgcgcgtcatcgtcctctccgcgcgcgcgcagcaggttcgttgtcatcgacagggaccccggcccggccctctctttgcctcacattttcgcaaaataaaggtatcttcagattggcagtgggacatattcaagcaaggagataggaggaggaggagggttccgttgaccagaaggagggagggagggtaaccgaggggcatcgagccgcccggcctttgccccgccgcaaggagccagccctgcaaacgaggacgccttgagtcagtcctctagggaccgaccgaagcgtaaaaacacacgagagagagagagcgtcccagtgcttcgtcgagaaggctgcggggtaaagggaggggggaaaagcacaggaaggagaaggagcaatgcggcgggcgggtcctcctcctcgaagaggaaaggatgcggccgagactagcgaaggaaaaacacgacgatacaggagggcaagagtgagatgggcgattgtccgtctacttgggctggaagtacttgacgtaactgcagaaggtcgggagagggattgggtcagtctttgacggtatttgcgtgttcgagtagacggggcatgcacgcgacctgccagtaggcctcgctaaaggcgtcgccgttgttaaggacgtagtcggagcatgaggcgtagcccgtcttggcggcgcacgactggtcctggccggcatagcccgcaaagttccagacgttgcccgcccagtcgccgcagaaggtcgtgtcaaagatggcgaagttgtcggtgaagaactcgtaagggttgcagttgtcggacgggaagtcgcccatcggccggccccaggtctcgggcatgggctcgttggcgacaatgtcggccgggatggcctcgcgcgggaaaaagtggacctggatgccggtgctgtcccacttcatggcgtagactccgccgccattcttgttaaagtcgacgccgtacgagttccgggtgacggcatcgcgctggccgcagccctggttgtcggtgttggccgacgagcagtcgtacgagttgaagttgccggtcgtcaggacaccagtcgcgtcatagtccttggggatcgtgcagccgggcccggtgtggagcgagacctgattctggctaaagtcgttgacgccctcgaggatgtcgactgaagagagagggacgaggtcgagcgcgtcagctcattgccgggttgtatgaagcagcctcgagcgacgtactctcgccgccactgcgataagtgggagagggtcgcgagagtcagtacaactggtcggagggccgagctttcgcaagcgcaagtacgcactggggccagttgggtccgttggcccaccaggcaggccacgtgccgcagccggtcggcatgtgaacagagtccatcaggatgagaccgccgttgaagatgtagtgcgagtggatccggaccgactcgcggccgcccttgacgtgcttggtctggtcgacggccataatagcatgcttctccttgttgatgacggcgagtccctttttggcctgcggacgcgcgagggaagggggagaagaacgtcggtcagtcaacgtcttgcagtactttggccctacaaagagcgctcaaggacgaacagcgttctcgcggttctggtatttgacagtaccgtgggtggggtcgtcccactcccagaaccaccacgagtcgaagaaagtgtcgccgctctgagcgccggccaggaagcaagtacagcgccgtcagcgtcaaagatcctctagggacagcgcgcgccaaaccactcacagcctcaaggtcgagcctccacttggagttgaacttggaggtcgagcttgtcgcggcgggagcggccgacgacgtcttggtcgacgaaatggacggcgagggcgagctgatcgaggcggaggcaccaacattgacgaccgacgaggcagcgcctgagggctgaggcggcgtcttggacgagccgtcggcggagcacgtcttgcgcttgcgaggggccttggcggcccgtttgaaactgagcgggctgctcgtgccgttcatcgacgcggcctggcggtagaggttctcggcctgctggtcggctgcagcggcgagggcagccgccttggaggccgggtgagcacccacagcgcgctgggcgagctgcttgcgagcgagggcggcatggtggccgtggttgacggcgtggtgcgacgaggcgtcgacggtcgaggccgagagaagggcagcgaagggcgcggcggcggtgaggaggttgctgatgtgcatcgcgagagagatttccgtatcgggggttgaaatgcgcttgaagggagagtgagagtcgggccagccgggggttgttcgagaagatggggcagtagtgtgtgtgcggttcggaaggggccttctgtgtcggttcgaggtcgagcttggtagaggtgagagggtgttgtggaagaagtgtcggtcgctatcaaagctaaacgcaggcactgattagtggaggaaggagaggagaggagctcggacaagaagacagggagaagagagagggactgggagggtggtagtagggagccaggcaacagagggcttttcaagccaggctagaagggcttggctgcgggcgcggccgtggggcgccaggcgcagagatcaggcgcgcggcgcgtcgcgtccgatggctcaacatgtcgctcagaagcaagcgtcaccggctccaaaccgttgcggcccagatctgcgggccagcctaaaagagagcctcttcagctgcctcaaaagctggctgagctcgagttgtcaatatggcctcacgtcctcctgcaacgacagctccgccccgggcggatccgtcgacaccgactgatcgacgtcgaggcgcgcagccgacccctttcgacacaagcggtgctcccaccgtcacagacggtgaccgagggtgaggatgccgggacgagcaatgtgagagtcatgagagatgagacgcgcaacagatggaaccagcgggaaaaaagatggaaagagatgggtcgagggaggcgaaggagggctgttcctgacaagtgcaagtcatcagagggccaagattagcccgttcgggccgtcggctccttgcgcgcgctgcctgctgtaccgccctggctgacggcccgaccgcggcgctttgacatgctcctctcgtcgacccgcgtgccgcccgcccagcgagcgaagccgaggacgtcgggccggccgactaggatccaagcgagctcgatcaggtggactgtgaaggtgatcagcccatagaacagcattgggatagcgcccatgaagacgtctatcggtcatgcaaggcagccagatgggtcagctgcagtcgatgttgccgagactcaatcaagacgcactgccgataagcccgcggcgggtgaccgtttcccagagctcggtcccgacaattttgggcgcgagcggcgtcgcgaagggccccagcaggcggtagttggtcgtaaaggcggccgagaagcagtagacaagcacgatgaaccagccgtgcgtccaccagagccggaacagcgacggctgagcgcccatgtcgcgggcgacggtcgacatgtacgtcctgcgcaggatgagtgtaagcagtcggccggcgacggaagagagccctgaatggacgcacgagtggtcgacgccgtagtgaatgcgggcggtatccttggcgagcaggtggtagtgcgccggcgtcgtcggaagcgccatccgcttctggacgagcagcgtgaaccacatggcctggatctcggcgattggcgggatcgcacctacagacggtgagaacgtctgtcagcgtcctgctgagggcccaaaaaaaccggggagcgccggggggggcgggggcaacgcaccgacaccgggccggacgaagccgaggaaggcgacgtcctgctgatctgaggcgacgatatcgcgcacgtcggcatcccacggacgcgggtactcggggccgagccactcgctgaactgatgacggcaagcggggggagggagaaggtcagcaactcggaagacacgagacaaagcggccgaaagtacccacctcctgcctgtagccggtcgcaaagatgacgaggctgagaggcacggcgtccgtcagtcaacggccgaaaattcaggatgggaacggcggaacactcactccggctcgaccgtcttgccctcgcgccgcttggcgacctccttccagctccctccccgctcgcggcacttgttccagtcccagacgatcttgccgttgctctcgactcgctcgggccagggcatcatctcgacaacgccctcggtctcctgatcggccggcggatcgtgatactcggagaagaaagacagcagcttcgagcgcttgcggtacggccggctgtcagggcgaaaggagctacgtcagcgtagcagcaaagccagggtcggcctggcgggctcacttcaggtacatcatggcccggtggctcttgttgaggaagacgtaggcctgtgcttgggaagctcgcgagtcagcgtctgtcctcttgaggcgcaagtcaggaagagaaaggccgcacccgtccgagccgctcgtccggcagctcgccgacccactggttgcagccggcctgcgtgccggtgaggacccagagcacgcgcttgatgacgaaatccgagacgaacctagcggatcaggcgagcgagtgtcagcgagtacaggcgggtgggcggcgatgtaggctcgacgaaccagcggagatgcgaggccgccacccaggggtgcacgtgcgtcgtctcaaacaggttggtgatgagaccgtcgatcgagaggttgccgtcaaacgtcatgccaaagagcgtaaagttgttgagctgcgatggagagggcagtcgggggtaagcgtcatttgcaggacgagtgagttgcgcaggcgggcggcgcaccatctttgggaacgacaggaagctggtccggtcgtcggcagaaaaatcagcgagagctaaccagcagggagcgaccgacgcccgagacttacccgccgcgcgagcacaggtagacctcctcggccccggctttgatgctctcaaaggcgaggtccatgccggtctcacccgtgccgcaaaccatgaccttcttgccagccagctgagcgcggcccttgtactcggacgaatggatgaccttcttggtcggtgacgagccgatgtgctgcgagcaacgccattagagaaggaggttagctccggttgcgtggctcagatgactcccactagggcgcgcacctgaatgccaggcaggaccggcgtctgcgggaggacgtgaagaccggtgcagatgcacaggtactggaccttgtaattctcctctgtagcggggcggtcagtcccgttccgacggcaggcatgcaaggggcgcgcgcagcagttgcagcaatggtgaaacgcacctcctccctcgctcttacggacccggacaagatggccgccctcgacccggttgacgccgacgacgcgtgtggtcgtcttgatgcgcggccaaagcgcaaagtggtcggcgtagcggtggaggtacttgacgtattcggggagcgaaacgtggtcgccctgggagagagggaagcggaagtcgctgaacgcggtgagctgtctgttgaagtgggtagaccggcatcagcggcgagctcccgagagcttgcgatatcagtagaagcctcttacttggaagagacgagctcggcgttctcgtacgccctgtagctgcgggccgtgttcgagcagggcggcccggggcgtcagttccggccgagagccatcagaccagccttgagctcgacactgaccggaacgtccctccaatttcatcttctgcctcaaagaggacggcgtgcaagccagactccttgaacgtcttaagagcgacgaggccggccgggccgcctgtcagtcggatggcaagagagagggttcggagggacggccgtcagctgtcgaccgatggtggagatcggcctcgaacgggcacgcaccgccgatgatggcgacctcgtagcgggtctcgggtgctgtcccgtccattcgatgggctatctgaggcgaggaggaacaaggaaggtgtcgtcggaggcacgacagagggctcgctcgcacctgtcgatctcgagccgcccggtgcttccgaacgagtgtcggaggcaaattccactcacgtcgctcccgccggggacgcgctccttgctcctcctcctgaccctgacgtaccactcctcctccttccagcagcaacggcagcaagctcaagccagaccatggccccttcagcgtcggaccgccaggccatgatggccggcctccgtgacgtcgacgagcacggtcaggcccgcgggcccgagaacgcccgggccaagaagctgcgcgagaaccaggagcagcgcgtccttcgcggcgagatgagggagcagatgaacgaggccaccggtgcgtggcctttcgattgagcatgctggttgactagcgttgactggctcgcccgctgcagacatccggaaggacatgaccaacctctcagccgcccacatcgaagagttcattcacaagggcgacgcgcggttcgctcgaggtgcgtcgttgtacccctctcgagcgcctcgtcggatttgctcgtttgctgaacgtcgcctatcctcatcgccgcagtcaatcggccgcaggaggctgcgctcgactcaaaggccttcatgacgacggcccagacggcggcgctcaaggcccggcagctcaaggtcgaccagaacgccttcgacacaaatgagtttctcctgcggtgcgtctaggcacggtcatctcgagctgcgcagtatctgtgctcgctttgtgactgactggacgcttcccgcgctacctcgcaggctcaagaagacgctcggccagaagcgggcgcgcgtcgctccgggcgccgacgatgacacggacgagagcgacgacgaggccgacgagcttggcgactggtcggcgatcggctggctcggcgttaagtatacgaagcggatcgtcctgcccgactttgcgtgcgtaccattcttgcgctcggtcgttgttcaggctgaacggccagtcgtgcctcttgcacctgcgcactgacccctcgacctgatcgcgcgcagcctcggcccgctcggcgtcacgcccaagacgcgggcgacgcacaaacgcgcccggctcgagatctccgcggccaagcacgccgagcccgaggccgtcgtcaaagagtcgaacaaaaaggacgccaacgagtcgtcgacgctgacgcacctcgtcgagggctggctctcgagcgcttacactttccacctcgagcgcgacacgccgctgaactttttcgagtttgtgtgcgtcctgcgagtgggctatcgaaggagcagactggccgacctgttgctgaccgtggtgccactcgtcccttgggctccctgcgcagtgtcgacccactgtcgttcaaccagacgatcgaaaacatcttctacctgtccttctcgatagccaagggtgtcgccgctcgtacgtcgccagctctcagcgttccgatctagtccgcctgcctgacacacggcctcgttccttcgcccactcgcccacccgcagtcgagatcaacgaggataccggcatgctcgagctcatgtcatccgagccggccgacgccaacgcggccgatgagggcgtcgccaagctacagatggtcatggagatggatatgcagacgtggaaggtgcgtgcccttggccctgtcgggggtgctgggtcaggtgccggctggatgggcggcggtggagggggtggcagcggtgctgtcggcaaggaggaccgcttgctgagcacgctccgggcgctcggcgaggagatcaacaacgccaaagagtgcggcttccatttaaacctcctctttgccacctcctcaagctgacgaatcgctggacccgcttccagagctcatctcatgcaaacatcgcatcttcagacctcagccttgctccagacggccgccgcgttgacagctgtcggttcggcgcgtttcaccgcctcgaccgagtctgtccgacgaatggctccggccgtcggcgaggtcctccgctggaaggcgcttgcggacgcgagctgggtcggcgcggccggcgttggcgagctcgcgcttccggacaacagcccggccgaatgggcagacgacgccccggacttgccgccgacgctcatcgacgctcttgagactgacgaagaggtcaacctacggccgccggtccggccgtttgcgaatccttcagcgtcggcgtcattagccggcagcccgccctcgtcccctcggttgcgggccagcccccttccggcacagtcgcctgttcgcccggctgcgtcacccttaccttcggcgcctgtcgctcggcagctgccggcggcgccctctccgagcttgcggaccccggcaccagctgagtcgcctgtcgaaagtcaactgcgcatcccgtcgcccgctggcgagaatggtagcctcaacggtcgacgagacggtggcagcggtccgaagaaggtcggctacgtcgaccacgccgagatcatccccgacggccggcagcgtcgccccgaggtcttggccgagtcgctcgacagtcgagagggtgcgcccgacaacgactacgcccgtctagtcgacgaccgcctccgatttgaagagtacgaacgcgaccggacggccttcgacgctgaggaggctgcgcgtcagcgggctttcgagaaggcggccctccagcgccagctcgaggaagacaaggaggctttccggcgcgtgctcgaacgtgaagcggccgaagcagacgctgaggccgaccggcttcggcaggaggctcgccgcgaggaagcggcccgtgagagggtcgctcgggcgcaatggctagagcgtgaggcggctgaggagagggcccgcgagcaggagacagcggcggccgcggtcgaggaagctcgggtccgagcgattcgggaccgctttgaagagttccgccgagtaagtcctgtcgtatttctgcacatctgcctgagttgaactctgaccggtggatcgacttcggcgccttccagcagtccgaccgccgcccgcctgcttcgcctccagcccagtcggcttctcctggcggcgcatcgctcggccggcgcgtctcgcaattgtcggctcgctttgaggagatctcgcatgccggctcgactgattcgccgaaccgaggcagcaacggcggccctcagccagcaggccctcgccgactcgcacggacgtcgaccgcctccttcgaccccgcggccaacacgcggccgctgaacgtcggccctccgccggctaaccctcggcggacgacatttccactcgcagcagcagcctacccagcacacggcccgccagctccttcggacagcagcagcttcggctcgatgatcaacggcggcggccggctgctccgtgaggaggccgtcaacggcagcggcatgcgctccgaggtgacgcaccgaggcgacgacgacgaacgcggctggcctgacctctcgagggaggacagcgtccgcgagggcgagctgcgcttccgcgagcctgcgggtagcttccgggcgaggccgccgggcgaacatgaaggacgaaactgcggctggcggtagtcgcgaggcagcgacgacatattggcgatcattcttggtttgcatgaagcacagacctacgaaggctatggtttgacactgggcagcgttcgagggacgataggccgaatgcacaaggcaggctgagccggagcctttagagcggccggctcgaaaaggggctcaaaggggggcgacgtctgctcgtcgctgggcgcccttcgaccacgatctcgccacctcccctcgctctccatccctcgcctctcgagcgatggccaagtctaagacccactccgagtataaggttggcgacgaggtcgtccacaagcagaatgtaggtacctcttcgtcagctgcctcgtcaaaggagggtcgatccgaccggaggcaggcgaccaggcggtgctgacgagcctgctgccttcccaacggctttaactctctgctaggcttcgaatcgggactcctccgcgaaggagacgcacgccgaagtcgtcgaagtcatcgagggcgacaacggctctgtctcgtacaccgttaagaactgggtgcgtgcccgacgccaccgcctcctctctccccccactctctgggtttcgcccgagactgatctgatcctcgttcatgggcacccttcagcgatcgaagaaggagaaggagatccccgagaccagcatcgtcggccgctacgtagcaaacgacgcttgaagcgcgccactcttgcgagcgtgccggcccagctccgtaccccgacggccgccaccctagttcgccgcctggccgcctcattcgccatactcggatgaacggatcagcgccttctagtccggcttcgtatctctatcgtctcgtccgtccctcatcgtctgtcgatcatgcccagctccttccatctcgtcagtacccttcatttgctcgcacgggcctttcacctctgctcgccgcacaatccccttccccgactcagctttaatagcctggctggcgatgttcatgtcgagcagtttttctttccgcactcatctgccatcttcaaacggagtagtaactgggaggacgtcgtcaaacgagatcaccgcgcaaccagagccgtgcgcatgcacgcgcaacgacgcccaccagaagcctcaaacaaaacgcttgcgagagacagcgacagacgggcaagggcatgcatgagcgagaagtatgcacatcgtcgagctgccggcggctagacgcccggtgtccggccgctgccgcccttgggcgtcttgccctggaccccgccaccggtcggcgtccgggccgcaccggcagggccagatgagccgacgcctcctggagtgagccccggcgtccgaggcgtcgcaccgggcgtcgactgaggatgggcgcaatggagagggtcagcccgggcaacaggacgagggaggccgggccaacgaaccgccttgtgccgcttcaggtgcggctcgagcgtcgtgtgcagcgggttaagcgaggtcggggccgtcccgatcgactggtccggcgggaggggtcgcttgttgcgtcccgcaccaaacgatggcctgcgggacctatcttcagtcaatctcgatgacttcgacctcggctttcggccgacccttaactcgccgaccagcggccggcgctgttggtgcgggcgtgacaggcgcggcacgtttgaccggaacggcctttttgcgcggtgccgtcgactttggcagcgccggccgctccgcctcgggtgacgacgtgatgaggacggactcgagctgcgacgtcggcttctgggatgacgttgacggcccagagtgggaagacgacgggaagatgctgctgccggcggccggccgcttggaggttgacgcggtgaagggcgggaaaaggggtttgggaggcgacaccggtcgcgtgaaccggggagcagttgccacatgacgggtccacgatgatcccgctcgagcctggctcgtgtcacacttgctcggagagccagccgcgcgagctggtggagcaaatggccgctcgaccacgactggctgcggcggccgctgacgctcgtactcgcggatctgctgtagttgattctcggccgcctcagcctcagcggcagcgatcagcgcatcctcgtcccactcgccgatgtcgtcgaacgggtcatctggaccgttcggggccagccactggaccggaggagcgagcggaggggtcggagggcggacgacgacaggcgctggcacgggtggacgagatgccgctggtcgaggagggtgcggagcgagcgcatccggcagatcgaagccgtccggaatgtagtcgtccatatcgtcttcctgggcggctgcgactggctctcggggccgctcctgcggaggttcttcgacgtcttctcccagcctgattcgatcaacggtcggtcagtgatgcgacacgagtggcaacgggaggaggacgcacccaaggcgctctcgcaggctacggtcgaatgcggcctcgtcccaggcttcgctaaagaggccgtcagccgcctcactcttgacgacgcaagtctctggcgtgagcagaaggacacctcgcaagacgtgcacattgcgcaggagcagctgcagaatgagagacgggggttcagcaaagtgctgactagtcgagtccatggccggccaaggtcgcgccgcactttcgtcccgagccgcgtctctcccagcttgagggcgtcgatgcgtttgtactcgatcgactacaggagaggaaaaaaaactgttgcgtcagtcgccggacttgcattcgagccttatctctccaaagccgcggagcctgcaccttgcagactgtggcgccgtcgctcaagtccagcttcagcatgccgcgcgggtaacggaggttggccccggtgtcattgtcgtcgtcctcctcttcgtcttcgccagcaagtcgccggatccgagccgtgcccttgcgagcctcgcgcctctcctggaggctcttgcgcaggttgaaagcagaggagccgacctggtccgggaggtgcgtgcgcagcgggccgagcatgagcaagtcagcccttgctcgacggcgcacacgagtcagcctcaacgagcgcaatgaaacgcacctcggtgattccgacgaccatgacaagacagcccttgacgtcgctgaagatggtctggtcgtgcaacggctcgccgtctgtttcctctgcgaggccgggcgggaagccggtcccgttgatggccaaccgcgcgaggtccgattgaagcaacgcccggtggcatcctttgatctggagctggcgcgagaggtcgggagtctccaccagtagtccagccagcgtttcgctcagccaggtctgccagagattgaacgagattagagccgtcagctcggtgctgcggggtcgcagggagccggctggacgcgtcgacgcggcctgcgaggccgcccgagctgccgttctcgtccgccacgggaggggaagcacctggtcgatggccgggcgtgggtagaggtgcctgagactgctcgagatctggtcgagagcagtcgtcatcgttcttgcggccggctggccgtctgatgagggtgcacgtcagaggctcgagcacaagtcgcaccgccagcccagcttcgtcgccgctccctcgaccgtcatctcgctcttcgcctctcagaagcttcagatcaagctcgaggatgatcgctagtacgtcgcacggcgagcatcagcaggcccaggcaagctcatcgacagctcctgctgctggcgctgtgctgtcgctacccggcgtcttgcccttccatccgccggtctttccgccgacgcacctcaccggctcgctcgacctcatctcggatctcggcctccgcccggcttacgatgcctttgtccggccatactttcgtaacccaaagccgctggtcgtgccgctcgacgctccctctggaacgcctggcggcgatctcaagggcaaaggtcgggcggtcgacgaggctgggcctggcggctcgctcgtcgcccaaggcgctgaggccgccgccacgcaaggcgaggtgccgcagccgtcgactggcaagagcggcaaggccaaggagacggacccgagcgtcatggacttgaagcgcttcaaggacctcgacgagcttgtgccagagtgtctcgtcctgccgggtacgcgtttccacccgagtggcccctgctctgtgctgcgctactgacgctgtttcgccctgctcgcacttgcaggcaaccatcaggtgattcgcaacccgccgacgtcgcttctccagctcgtgatggatgcgaccgacgacatgggcaaccctctgcctcggccaccgatccggctccggtcggcgctcgagctccagggcaaaggctggtggctcgcgcctggcgagctgcaggaggtgcgtggcagttggttcgttgcgaggcatagcgttggctgacgacctgcgttgcacatcaggccaaggaccccggtctcttcgttcggcagcctaagcccgaaaggaagaaggtgcgctcaaagactccctcgcgcatattgtcaagcccgctgcactgactgaccgaggcccgccgcgctcttttagaaacgcaacaagcgacccctcccgccggaccagtcgatcgggacggccccgacctcgcttaacccgctgcacacgacgctcgagccgcacctgaagcggcacaaggcggttcgttggcccggcctccctcgtcctgttgcccgggctgaccctctccattgcgcccatcctcagtcgacgcccggtgcgacgcctcggacgccggggctcactccaggaggcgtcggctcatctggccctgccggtgcggcccggacgccgaccggtggcggggtccagggcaagacgcccaagggcggcagcggccggacaccgggcgtctagccgccggcagctcgacgatgtgcatacttctcgctcatgcatgcccttgcccgtctgtcgctgtctctcgcaagcgttttgtttgaggcttctggtgggcgtcgttgcgcgtgcatgcgcacgggtctggtggtgccgggcggcaagatgcacggactgcatcaacgcagccggatgcaaacctttccattcgcctcggccgtcggccggccagcgccccactgacgcgcacagtcagaccgaggcctgtcaggcaggagggcgatgagagcgggcccgcgagtcggccagcgtgcaggagaggccctcgcctcggtcggaggccttgcgcgcaagacccgcgtcggcgcagcaaccgagtgcctcctcactcaagattcgaccgacacgagccacccataggcgccactcagcctgagtggcctgaggcgctacttgaccaacagatctagaaacccccgcacattgtcccatacgacttgcaggagacgtgagaacgagattcgaccagcaagaggtcatgcgtggccaaaaaaacggcggcgaacgaagttgacgggtacaagggtttactcgtcgtcctcctcctcctccgagtcggcggcctggccggcacgcgagtcgttccagagctggatcttggcggcgatcttggccttcttggtgtcgtacgacgtccgcttgtcctggtactgcttggactcctcggcccagttcttggacttctcggtcggcgtgaacgacgggtcctcgcggatggcggcgtaagcggcggcgtaaatctcctccatgtcctcagagccgacaccgtcggcgaggtaggtcgagaactgcttcttgaagcgctcgtcgtcctcctcctcgagagactccatgtactcagcgacgtggccgccgtagatgtactgcccaagaagcgaatcacagctgtgtcagcgcctgcactcactcgggcacggcaagcaaagatcagagacgcaccttgtggaggacctcggcgtcgagctccttggcctccgggtcgaagccggggaagcggttctccgagtgggggacaaagatgccgccgtcggaggcgcccttcatagcaccgaagacacggttgccggtcgaggtccgcttgaggccgacgtcgaggaagcacttgaacggccggggctcgtcgtcaccgtcgagcttctcggtcatgacgagcgagccgtcgggctcagtctggccctcgtacttgtcagcgaggttgagcttcacaagcgcacgacgggcgcagaggaggccggtggcgtaggcggcggtccagttggtgagaccgtgcttgatgccgtaccgggggagctccttcgagcgggcgtgggcgaagacgaagtcgccctggagcttggcgtagacgacctggacgatgacctcgcggttggtgaaccggacaacgagacggtacttaggcgcgttgtacttgttcttggcctgcgaaacaagacgcttgcgcgcgtagtctggagagcaaggagaaagccagcaagtcagcgcctgaggccaggagcaggcactggcgagagggtggatggagcctcacagtcggtctttccctccctgcggcgccggtacttgacctggtaccgggagaagtaggcgtcgttcttgacggtcttgacgaaaggcatcttgactgtgaaagtggtaggcgaagagggtcagcgagctggacgaagggtcgtcttctgtcgacctctgccctgcagccgcctcttgagtcgcaactccgacatccctcggctcccgttcgagcggacgagctcggacgaatggcacaaaagcgcagagcaggaccggcgtctgctgcaggacaagagacgagcgctgcaagagctaagacgtactgtgacttcgcggggtataagcggggcgagggaagagaggcaaggcgaagccgagcgctctcgaaaaaagctggtgcagcggccgggcggttgggcgcgcacgacggctgcggcgatcaaaagaatcaagtactccatctaaggtccttgcgctcgcgcgcgcgcccccagccctgatccaccgaccctgaaccgcgcagttcatgattacgtcagtcaacgccttcgtacgcacagcgaccagatccacttgaagttcccactgaccaacatgtccagagataggcttgcgatactggggatttgtgcgatctgctgccctgaacagactcgagagcagggacgagatggcttctcggtgcggatgttggccgctctgccttccgtcgtcgacgccacggcccaccgcggccgagccgactccgcccggcgcagccttcttgcttcttgcgctcttcctcctgctgcaaaggagcttgcaccaagacttttgtatgctacgatgccgccgcgaacgagcagggtcctctgcgctccctaagcttctctcggtggtgcgccctgctcggaaggatccgttaagggaggggcgagatgcttgcgaggctgttcgtgcctttctcccgccgccgctgcgcccccgccgccggctccctctgcgcacggtcgtctctcgctgcgagaaggtctcgtccatcgccccgccgccccgctccgcccacacgaccaccgcccgacggtccccgcccgactccttccctgtcccttgcaaaccaacaaacgagcgcacgaccatgttcaatcccttctagaccaacaccgaccctccctccctgctcgaaacaccgccgcccgccccgcgcgtttcccgaccctccgcctctcgaagagagaagcctccgccaggccgacccagctccttccagccagccggccagcctctctggccccctttggaagcccggctcccgaggcccatcttccagccccgtcttcggcccaacctcctcgccctctcgtcctcgcgtccaggtcgcagagtcgacccggtccggctttcgccaccccgtcgcccacgctgtcgtcgccgccgccgcagcctcaaccgagcagctcgtcccgcctcccgtcgcctcagccgaccatgtcgatcgcctcgtctgcctcggaggatggctgggtgccgaccatctacgaccaggtcgaaaaggtcaagggcacagccgagaacaagcggaccgtttgctgcgtcgtccctgtgcgtcgtcgtcctttctggcaggagcctctcggccggggcgcggtcgtgtgccgcgcgcgcgcgggctgaccgagcgagctccccttctcggcacagtacgacgcctcgacgcgttcggtcctgatgatctcgtcgcaggtccgtcttgtcccctgtcctgtttcgtgcgtagagtggcagagagctgacctgccttctccgcctttgcagaagaagcctgggatgtggaccgtcagtcctcaccgcctggctggagctccgcaagccaccacggctttacacggcggaaagctgacgtcgaccatctcgttctcgtcgcgaccatagctgcctaaaggtggcaaggaggagggtgagccgtacgccgaggctgcgctgcgggaagcctgggaggaggtgtgttctcatccggtcgtcgtcagtcaatctatctttggcgctgactctggttcggccgccttttcctctcgtgcttctttcagggtggcattctcggctacatcacgtcggattgcatcgtgcgtcacccctcacttcttgcccttggatgacctgttgactgacctaaaggactcgctcgacccgtcctccagtgccagatcgacacggagcggaatcacgtctacttttacccgctccaggtctcggagatgaagccagagtggcccgagagcggccggagcagggaatgggtctcggtcgaggaagccatcgcgcgagtctgtgcgtcgccctgtttacccgctcgaagccgagcaaagcgactgacacgcttgtttttcccaatgacgacagactggcggccggagcaggccgaggcgctgcagcacttcagcacgtggcgagacacgctcgttgagagcgatacgagcaacgagtcgtcggaaagcgggttgccgacgtcgggcgccgacgaatggtgcgtcttcctcagcctcttcctgtgggaagcccgagctgacacgcctcatcctcccgctgcagagctgcgctcgttcaacggccgattccgtctcaagactcctcatgtctgctctatttcctgctaccggcccgctttttgtaaaacccaatgggcgcatacccgaacctcacactcccattccacccttccttctctaccacaccaccacccgtcactccatcgccgcctggctcgcccacccgcgcgagtctctgcgcctccgcttcgcactgccgcctctctctgtcattccacccctggccatgtacgaccctaccgaccgacctctcggcccctttttgctttttttgcgccctccttggataccgatcacaccatgcaccgcacctttatgctgcctgttgcaagcgtacaagcgttcgaggttgagtctgggcggcgaggtcaaggacggtagtcgcagcgcagcgcagaactccggcctcgctcctccccttgaccacgacccagctcgacgaccgaacctcagcagagctacgtcactcctctcaagcacaacgacgcacatcaacagacaactaggctagagcgacaagcacgcaaaacctggatcttcgctacatggccctcaggtgcggctctggcgactgctgcggctcatgccatccagctgacacctcgctctggcactctcgcctcgccaggatccctcgacccggccggctgctcgcccagctcggcacttctcgtcacgctccaggccctccggcagtgagcgtgggttctcggacctttgccgtctcggcggcaagctggtcgacagcaagcggatcgcttccaggcgacgaccagcagctcgaacagactccggccaccaggttcgttcgactttctctgcgcgcagttctcgttcttcagcctgtgtcagctcggagggttaagctgaccggctattgcgctcccccctatcagcctgccagataaatcttccagtgaaccgactgcgagcacgagcgccagcttgtcagcgatctcctcggcgagcgccggcctcggagacgttcgtcaacccgttcggctcttcgtttcggagtcgaccgatgaacctcgcctcggaacgcgcgcgtctgacggcggctcgtttggtgtcgttgcggccgagcggcgatccagtcgcgagcagaaggaagctcggcggctcacgaatctcagtagcttgacggctccatcctcgaccgagctcggcaaggtgatcgctcagggtccccaggtctggtacagagtcctgagtgcgtgatcggccctggagcgctgcgtaatcaatcagcagaagctgacagtccgacccccgttcttgcgcagctgaggacatcttgacgatcccgcagaaggtcctgttcctcgccgatccgcaactgcatggttcgccgataccgactgattgcgacaccaaatgggatgcgtggtatgcgttcgtccgccatctacattcgtacctcaacccgaagaattctgtctttgctctccaggacgacgtacggtcgacccttcttcaggacggcgtcacgcggatccttcagcaccagtcgacaaacgacccgttcctcctcctgctactgctcgacctctgccaagaaaccaaggctgagtcgagtgccaagctttttaagatgctcgccgatcgcgtgcgtgaggcccaggcagactggtgggtggacgacgggcccgagcacttgggcctggtgcagcggccagtggcaattgtcaagctcgtcgaccggatacggctcgcactctcgcgagaggacatcgccgacgcatgggaccagtcggttcatcccaccccgctgctccttcaccggcgacggctctacaccttcttgacccggcgcaagccttactaccggtcggcggccggcctagggggtcacgcaaccaagacggtcgactacgtacttaactttgtcacctcgagcgccgtccagcacgcgacagatccggtcgtcctcatcctcgtcctcaagatgtatcaatcgacgagcccctcggtccgcggtgaggcattcttccgggcgacactcgacctcctgccggagctttgccagacgtggacgcaggaatacaagcgctcgatccgcgagggcattgccgtatgcaacaaggccgacgccgaaatgtaccaggcggtccggcagtggtaccggcgcgacctcagccggtacctcggcgaccagagcgacttttggaagggcatcttcccgaccccgcgcgagatcggcactggtctcctctcacgcaaggacaaaggggaggccatcgagtcggcccgcacgcgcggcaagagcatctacgacccgggcgaggcgctcgacttcgttcgccagcgagccctccattcgaacgccgagcgcttttggtcaaaaggcgagtctagcgccgacgagagccgcgttgaagaggcggcccgctcgtttggcatgcgcgagggttgagggtcctttctctcaacatgaccatgtcctcctcgcacactctcgactgagcgctgtccggctttctggggccgtcgacgagtgcaccgtttgatgacgaagcacgagcagggccgcagaaggcagggcgacgcgcgacccctgaaccgtgctcggcttgcctctgctggcctgcttcacgctatcattccgtccgaccggctcgagtccagcaacggcctcttctcagtcaagctctgtcgctcctataggcggtgccgtctcctacgtccgcagccatgacgacccctgctgagcttctcgatgtgctgaaggagcatctggctcagctgccgagcccgccaccgccgctcgaggtcgtcccgctgctcggcctgctcaagcacatccagtacctctcgtcccaggcgctcctcgctcagtcgagcgcgacggccgaggtccggaccgacgtcgaccggcagggcctccaggagagtggcctgagctacgagaagaagcgactcgagagcgagattgcgagctgcgaggcgttcgagtgcgtgctcccaaatcatccggctcgacggctcgcctagaacgaggctaatctacctaacactcttcgtgcaggtcggtctaccagacgctgccgcttgacctcccgccgccgacagaggagaaccacgagcagatcctcgctgcgctccaggacgagctggcgtcgctgaaggcgtgcgtccccactacccggggctcatgccggccgacggatcggtctttgctgatcattgcaccttgcactataccagtctccagcttgagaaggaagcggtcgtcaaggacgtcgaacaggccaagaaggagatcaaggacggcctggcaaagcttgtcggtcaggacgttgcgctgggcgactacgccaaggtcagccttcgcccacctacttcagtcgcgaccgtctggcgtcagctgctgacgctcttttccctctattcctcaagtttggcaacaccatttacaacagcaagatgcagtgagcgctgggcgaccgatgcagcgcagaatcgtcccctccacccgccaggagtcggctgtctcgggctctcaccagttgctcgctcaattcgagggacgcagctcgggccgttggtcacatgcagggctcaggtccgagtctccgaggggaatcgagtagcgccgccggttggcgctgtccgacgccgcccctctagagaacgaccagacgctccgccaagccgcacagcgactaaagtacctggcgcaagaagcggtctgctcgacgcgacaggtatcctgatgatcccacccgggcgagcttgcattccacatctcgtgcacggagacagggcggcgggcgtcgagcgggcgtgatggctcgggggcactaaaccgggcgaaagcgccaggtctaagctctggcgccgtcccaacagcgtactaagcgagtcgggcgaggcggtgaatggctcacctcgactatcagcagctggctatcgtagcacacctctgagagcagagcgaaggatgctggtcagacgaccggatgccagcctagcttggtctggccgacagaggtggcagcatcggcttcaacaggcacaaggacactgcaccgcaaggtgcggaggcgagtaagcaagggatacccgccgtcctgaacgtcagtgatgaatgcaagctttaagagggcagcctgggtttcggagggagcgacgggctctctgtgaaagtcgagcaccggcgagaaaggggctcccgctcggaatggtttgtcttcgtcaccggccgacgccgacctctcctcttcctaccagcctagcatcttcctcaggtccagggcctgcttcgccgctgatgagccgactatggccgtccgctagccgtctgctcgggctcgacaagctccctggacagctggccggcgcgctgggcgccgccgtgccgacactctccgccgctcagccttcgacgtcctcggcgcctcctccttcaaggctgaccgatggcagcaactacaatgcctcgcagccgccggacacctcagcctcaagtgtgtccgcgtcatcgtcaagcccgtccggccccgactggcggcacatcgtccaggagctgctccaggccaacgagcagcgccggcggctcgccgctgagctcgctgaccgccagccagtccgtccttcccttcctcatccttgtcggggccggctctgacacctagcgtcataatcgatctatcatctcgataggctgccgccgctcctcctccgcctcggtcggtcgagcccaatggcttcactccgctcccgtacgctccacgacagcccgtgccaggaaaggtggtcgtcttctgggattgggagaattatgcgttgccttcgaccgccatccccgtcaagtttgtcgttgccctcggccggctcgtccgcgagcgggggctcggcgaggtcagcgagatccggttgtacagcgggcagacaatcggcatctcggcgaccatcgctcaagccggcatcacagtcatccacgtcccccatgacggcaagaacgagtgcgtcgcctcccgctctgataccgccggggtttttgctggcttgtgcggagaagtctgctgacctgtcggctgccactcactcttcttgttgcgtcagggtggtcgatcgccggctgcagcacgacatgtggaagctggcgcactttgagccgaacccttcgactacgacggccatcgtcatgtccgtcggctcgtcgctcaggcgatcgccgcggacaagcgttcaagcgttgacgcctggcctccgcccttttgtgtctgcagctcgagcgactcggactttacgccgacgatcctctcaatgcaaaccatgtacgaccttcgacctccattctcgatccgaagctagcgctcggttaacaatcgtacgccgttgaccccgtagcggcctcaagacgatgctcatcgccgaccccttgccaggcaagataatctcactagcgctttcgacgaccgaaccgaccgcgtcgtggacgcagctgaagaacgtgagtcgtctttgccttccttcctcatcgggctggtgccgtcaatctgcgtctagtgtatgctggccgatgactcaaacctcgtcggcccaggcgtcgttaccctctgccagcgactcagaggaggcgttcccgtgctatgctctgtcgcctgcggaggcggtcacgacgcctgcaaaggcggattcgacgcccgccaaggcgatctcgccgcccaaggccaagatcgccatccctgcgaaggtcatgttccctgtcgtcaaagggccggccccgcccgccggctatcggtcgccgcggacacagcggacgagctcagccggtgggcaatcccacgctcccgtcctcgtcaaagagttgaacgacatgctcgacctatcgagtgccaaatctcaagtcggaccagcagtccaagcgtttgaccccaagtctgaggtcgttcccgagctcgataccaaagccgtggccgagatcaagccggaccactcgacgcttgctatcgtccggtacgatccttcaagattcgcatctcttgattcgctgcctgctgtcgaacctgtaggcgccgtcgccatggccgcgatcattgagcagcctcctcccagctcgacggtcttatggcttcctaaagcccgggctaaggtctcacttctctcgtccaagcaggccaagaaggccgagaaggcacgccgcctcgaggcggacgaagacgccggcatcgctgcctggattcccatcgttgtcaaggcggtcaagcacttgaccattcggggccctagacaggaggcgagagacccctggggagtactacaagggaaaaagccgccttccgttcaacagaccctggcccgattgcagcatatacgcgcgaagaaggagaagaagaagtcaggagcgtacgatcacacgatcgagatgttccagtccttcgtccagggcgcacggtcgacaccggccgtgagtcaggtatctgttcatcctcagtcctgcctcattcaactgacgcccttttcttgcccttctcactttcaagctcatcatcttcaatgattgcatctacgtcgtccctacctcgaagcagagggcgctccttgagcaagcccggaccaaggccgccgaggatacctggccatcgcgcgctcttgacgtcgtccgggctgagataagcagctctgggctctcgcccggcgtcgtcgagacttttgagcgcctgaagctcgctcgcgatcaaccgatcgagcccactccgccgctcgactcgcttcttaacttcatcgaggcggtcaagggtctcgagcctcctgtcgtgcgtgaccgcttttcgctcacgatagcaggcgccgcttgacgctaacgtgcctccttttgtacgcagctggtcgtcgactctggctacatctaccccaacgagtcagaagcagagcgatacgccgtcacgaagattgtcagccaattctaggaatccccgcagccggtctacctcgacgaggaccctctcaacccggtagacggcctggacccgcggcagcagccatcacaagagctgctgctgccgccgagctcgtcggccaagacgtgcaaggtcccgctgctgctcgagaagtggcgcttcgagccggcgcggccgacggcagtcggggccgacggcgacggcggggccgaacgcccgccagacgcctcgacctgcctgtcccgagtcctcgtcgacgcggcagatcgtccgcatagacgtccccgctgctgcaacgcaatcgaacaacgcgaatccgcctactgtgaccgcgctcggcagcccgccgaatccggttccggccgtcgatgctcagtcggccgaggactcactatcgccgcccgccgcgcagaggccgctctaccgtatccagcctctcgacaaacctccaagcacaagcgagacaccggcgacggctggtctcgaatcggtcgaggcacaggcagccgctgcgtcgccctcgggctgcatcaaccccgtctcccgctaatccgcaccggtcacggtcgcttcctccctcggagccgtctcctgctgctgcgagttgataccccgactcatagactatactcattgccctcgtgaccgtctgaacctcttcgtcctgagtgcaggccgcgaggcgtgctcatgcgccggagcgatgactaagcgacccttcctggctgagccgtcgcccgtcacgctcgcgtcgtccttcagcgccgaccgcaactcaccctcggctctcgacagctcgcagctgttctcgagcctcatctctctcgcacccgtcagcctccgagccgagcgcggcaccatgtccggaagcggctcgcttcgcggcctctcggcctacgatcgtcacgcccgacaggcctcggtctacgaccctgacgctgcgcgggccaaggcgacagaagctcgatgcctaacgctggctcggaccgactttgacgtgctcaaggaggctcatcggtgcgtctggcctgcctggggtccgtggcgtctgtcgtgcgtccttccgggagctcattgctgacgagaagagagtctaccgccagcttcatccgcgacgacgacgacgacgaccggccgggcaacagcggtgcgtcggcgacctcgtacaaggacatgcagtatgccgaggctgtcgcccggcgttacgaggacagcctgttcaaggagtttgctctctgcgacctcaagcactggcgctccggtcgggtgcggaccgagcgagccagcctgtgtccctggtacctgtcactgacctgccgctcgcgtcgacgtttccgggtcgcaggttgcgctacgatggcgtacgacggccgaggttctcgagctcatcggtgaggagacgtgtggctcgctccgctgcgcctaccacgagtcgacaccagaccacccaccaccgcccttgagcacggtgcgtcttgctccgcgctgctccacttgcttgcgccccgctcacatgtgacatgctccgaccgcaagttcgagttgccattcgcgtacgaggaggctggtgtcgcaaagcaggcgatggtcaaggttgtcctctgctcgcgctgtgccaagaagctcaagctcccgcgaacggacgaccgggctgccgacgggagcggcagtcgcaggaggcgagcgagcgacgagacaaggctagagggatcgccaagacgctcggatcgcagtcgccggaaggaggccttaccgcagagggatgccagcagacgctctgcctcgccgcctcagagcgagcgccgacggcgagatgaacgtgacggcagcggcggcagcgacgggcaggcccgccgctcgagctcgaggcgggaaggctgagctgccagcggcgcctcaactgacgatggatcatgacatgacgactggcgacagaggcttctgcgaggagagcatgcgaggcttgtgctacaaggggaggcgatgcgaaagaggattacaaagtaggggcatgcgaaggtggtacgtctagccgaacgggggatcgtgtctatggtgcttagggagggggtttgaggcggtaaggagtggagagccggctgtcatgggaagccgccgtcatcgccttcccagttgtcgtcgaccatgcgccggcttggcgtagggatcggccggctcttgatgcgcaagaggccgggcgagcccgcggtctctgcctcagaaaggaagacaggcggcgtcgccttgcccccattcttggaccgacacgcttggctgtgattgtacgaccgacgccgggctttgcggccggcaggcggcgccgtcggacgcgcgccagagtccgaaacgtgcatctgtggcggtggcggccgcaaagtgtccgagacgtacgcgtcgaggagaggccggtcgagcgcgccgaaggaggccgggatgggcgctttgcgcgagcgagccttcttggcccgccagctagccggcgcgggcgaccggtctcggctacgatcgcgcccgctcgagctcggtggcggacttcggtgtcgcgagcagcggccatggcggctctcgccgcccgccgccccaccgccgtcggtactgctgagcagctcgcgaagctctgcctcgcgctccttctgcttgccctcttcgctcttgaggtgagaaggaaggaagtcgtccctgcaaatacgctccgagggctcgtcggccgaggggagatcgctgagggcttctcccatctctgccgctctggaatgacgcaggctgaggccggatgctccgttggacaggagacgcggagcgtggtgaggcgagtgcactgaaactttgccgccgtcacggcgccgaatgaatgcaaacagctgccggcgccgcttcggtgccgcatcgttggtcacggccgccggtagagcgaggggcgaagtcgaggtgacggcggcggcagtgatgggcgccagagtcggcgaatgcctggcccaggcggagcggccgcgaagggaggatgagcggcgatgagcgagcgaagcttggcgataggtgctcgacagatcctcgccgtcctcattcggggcgagacccgagaagccgctaaagttgctgaagatgctccctcggccagaagtctttgtccggatcgaggccgtctcgtcgaacgcctccccctccgaatcaccgctgggtgagtcgtcgtccgagtcctggccgaagagcgcctcgcgtcggtaacggtatcgcgcgccctcgcgctcgccgagctcgaggtcgtcgcttccttcgccctcgtcatcctcctcatagccgtcggcctcctcgtcgacagcgcccagcccaacatcgtcgtccgacccggcatcgtcgtccgacccggcatcgtcgtccgacccggcatcatcgtccgactcgacgtcgtcgtcgtcgtcgtcgtcgtcgtcgtcgttcgactcagcgtcattgtccgacccatcgtcgtcgtcgagctcagcatcttcgtcctcgtcaaggactccgacggccttctcggggccaagcgcctttggccgggcgcagacggcagcgacggcaaatgtcaagcctgagactttgcgcgtcggggtcagcggacgagcttcgattacggcagggtggcgtggtgttggcggcggcgatgccaagggctgcttgatgggctgctttgaagggtccacgaaggagagcccacgccgcacaggcggtgcagctagcaccacggtcgctgcggcgatggccgaggtcgggaaccatgccggggagtcacgggcagacggcgcaggcgaggcctctggcgtcgagaggagtatgttgactgaggagtcggttgccgcatccgtggcgggcgtcgtagccgatgagctttcagcagcacctcgcttggccgcgatctgttgaagcgcatgtcggagtcagttgactgtccgtctcaccaccatcagaagccagacatggtgagagcagcgcacctcgggatcgtcgacaaagacgatgctcggcttgcggatcgagctgttcgcgctcggcgtgaccagtgacggcgccggagaggccgccaggaaaatggagggcggcttggccgagggaatgccgatgcgcgccttcggggcctgcttcgagtgggagtcgtcagcactatgcggagatcgacgaatcgtaaaagccgctcacctggaagggccgccggaatggtttatctgccgccaagacgagctttggccgctcgagcaccataggctcgaggcactgtcgcgcgtcctgtgccgcaagttcaggctcctcggtctcgccctcctcgccgacattctcgagcatctcgcacgcgccgctgctaaagcgtcgctggcgagcgctttgggcgaggtgcgggtgaatcgacccgccgagcggggacgaggccgttgaattgggcatcgacgaggccggtgaggcgaacgccgaagacggcggatgagcgctcgagacgccgctcgagggctgctgctgagcgagcgctttggtgtggtgcgagtgcgaggcaaggagtgccgagaggagcgagacgggtggcggcggggcgtgcgcaaaatcgtcctctggccggagagcgctcgggctcgacgtcggcgaagggccagacgagagcgagagggtcgcgccgaggtcaaagccaaagggcaggccgattggcgaggccgggcagtggtcagagctcgccgtcgtgccatgcctgttcgggccgtgccagccgtggtgatcgccggtgtaggacgatgcctccgagagcgaaggcgtccgcgtgagcgtgttcgtcgccggtgcgtgggctgagctggttgacgagagcgagagcgtccgctctggcaccaccgagcgagccagcgcttggaccggccgcttggcgaagaagcccagcgggtcagacgctgggtaggtctggccggcgccgccctcgacggccggctctcgaggtagcggcgacagacccaggccgagcctcgctgaggacggtccggaagccgacgaacgatcaccaccttcgacagccgctgcgccgacgacagcgtgtccgactgtgcgcagggaagtcacgtcggaacgcggcgcaagcgcggttgaaggctgcagctgggcaagcggcaggaccgtccgccgccacgactcgacgacgtgcagtgacgagccaaagggcgaggtctgcccgatgccgcggtcgctgcctcgacgtcggccgtcggccgtggctgagctcgtgctccagggctggtcggacatcgttcgagggtctaagcaaggacgattggcgaaccagggaggtgcactggctgtcggagcagagggggttcgagtgggtgcagagggctacgacctgagcgccatggcgtcgcggatcggaggagcaggacaagccgacgaccgagcgggtcgaggagcgggaagtacgtgcgtgcgtccggtgcaagggaggtgggtgtcgagggctctcttctttccctctgcctgttcgtccctgtgcgcctgctgccgttctttgcgcgcgtgcgccgcctcggcacaagaggagggcgcagcaggacaccctgagctgcagcacgaatgagaagtccccgcaaacagcttccccgtgggcagggcaggaactcaactcagcatgcgagccgcgctgtgtcctgcctgagagcagtctggcccggcggcgcgtacctctgagcgagagcgttgcacgctctcctgcttagacgtcgcgaacctctggcggtgacgcaagagaggcatggcacgagcgagagcctttggcgccgcgcccgccgcgcgcgccgaggaccgcccaagtccgtcgcagcgtcgctcgcgacacggcaggttcggtggctagcaaaaagtgacctgcctcttcaaagaaccatttccaagattgcaagtgcagcccctggccgtgcctggacgaggcatttgagcaggagggacttagacggttcgatagatgaattctggttggaccttcgcgccgcgggcgtccccgaaccgcagcggcgctcgaccctcaacgcgtcgcctgctcctcctccgatcaccctgctagctcaacgagtccgtatccaatcatggcgtcgacaacgaaacagtacaagcagcttggggtgagtgtcaggtctgcggcagcaaatctcctgaaagtggaggctgactgcgaccatctcgccgtacgtgccgcgcctccgagcgatcaggaggacctctggaagcagcgcgacaaaatggtgcgcctttctcgctcagagctcttctcttctcatctcgctagaagctggatctgaccgcgcttgcccggctcagaactcggagatctttacgctcacgtacggcgcgctcgtcgtccagctcgtcaaggattacgaagactacgcggccgtcaacgcgcagctcgacaagatgtttgtcccttggtcgccagaccgttgtccctcccaaccggatcgcaacgctgacgtgtcccttacgtatgtgcgtcctcgcaggggcttcaacatcggcacgcgcctgatcgaagacttccttgcgaggacatcgctcccgcgctgtaccgacctgacgcagacggccgagatcctcgccaaggttggcttcaagtcgttcctcaacgccgttccctcgatcgtctaccctccagcaccccccggtggcgggccgatccacgagtttgggctcgtgctggacgagaatccgctggcagagctggccgagctcccgccagacgcgctcgacggtgggctctggttcagcaacgtcctctgcggcgtcatccggggcgcgctcgagatggtccgtagtagatcagtccgtttctcctctgtagactcaactgacctcctacgaaacgctcggcgcccgttccaggtccagctccaggtcgaagcgcggttcgtgagcgacgtcctgcgcggcgacgacacaaccgagatccgtgtgcggctggtccgctttatggaggaggagatgccggtcgcagacgattagatgagctggcacccgatcgtctctgcagcctgtttttgactctatgcagggctggccattcggtcacaagcatcgaccccattcatacagccacgaagtcgcaaggcaggaagccgctcagagcttagccttctgggcgtgaccggccggcaggccaagccttgcctttgcctcgcgctcgacatcccagggcatgttgggcatccgccggccattcttgttgccgatgacgacaatatcgcgccagacctcgctccggatctcgccccagacgcccgtagccgccttggcgccgactttggtcgccagctggcgagcagtcgtcatgagtcctgcgtccgaaggtggcgagagcgagacgacgccgttcgaggcaagggcggtcgacgtcaagcgttcgccgagtagcgttggctgaagcagcgtacgcggcagcctgtcgcgaaggacggcagcgaacaggggctgcaagcaggagagggaggagaccttgtcagccaggcgtctacgttcgaggacggaaagtaagcttcgcaccggcagaggcgcgccgaagtcgatctgtgatggaggaaaggtcagtctaagaggcggtgccgacggcgatgatgcccgtggctcacctcgttcatgcagcaccaggcgcggcggccctcgagctcctcgcgcatcacccggaaatcgcaggcaagcgagaggagaaagccgccggcaaagcagtggccgtttattgcggcgactgtcacgagcgggaaggagagcaagcgaaggatgacagggttgtagacgactgtgcagcgatgcgagagggcgcagcagatgtcagcagacgcccgttcgcggtaaagactcgatgcgggtcgagctgacggctgtcgagaaagatcgtgtcagctctttctgctgagcagtatcggtgggaacatctgaggcgacaaacgggtggaaggtcgggtccttgagcgagtcctcgtaggcgagacctggcgtcgacggcggccggccatcagcttgcgagctctcctagctttgactcgccaacatcgtaacagccctcgcctgaagggagacgcaccgtttgagaagaatttctcgccctcgcctcggatgacgacggcgccgccgaccgtgcccggtcccttggcccgctggctcttgtcgagcttcgcttgggtctccttgaacgcctcgcgccgctgccaccagtcgcgctcgacggcgtcaagcgcctgtccgagctcgcggaggaggggcgacgtcagccgatggtccggcgggttggtgagcgtgagtgtgtagacggcgaccggggcggcgacgtcggggaacgaggtctggacgaggggcatggcgggccgggggactgaagctggatggcgggagggagctgctgtccgaggaagcggcaacggccaaggaagcagacccgtcagtctaactgcatccagcactactccagatctaaccctgtcgacgcgcacgaaaggttcgcttgctgcgaggtgatggtcggagggactaatgcgagctggcatgcggccggataaggctgagccgaaggccggagggagcgaggcccgcgcagcaacaggcgccagcgaagtcgcagtctaaggtcaacaggctactagacaattggccatctattccttctcgtcttcctcgggcagccacccgccaagcgccttgccccacgtcgctcggagctcctcaatagcgccgacgagtttcgcagcctcgccttcgtcccattcgaacgaggcgacgcgcgtgtaggcccggccccagcgggtcgcctggctccgaaacttgcaggcgatctgcttgccggagacgctcggcgaagtcggagccgccttgtcggccccagcggcatcgaccgcggccttgggcgcctcgacttcgacctcgtcagaggggcttgtcgagggcgtcatcgggacgagcgagtcgggcagcaaggcaacgtggacgaatgcgatcgtgcccgagagcaggttgatcggatggttctgcgagttgcagacgagccgggcctacgatgtcgcggagagcagaagaagagtcagatggagtcgagagctttccaagagtgcaaacaaaactcacaaagtagaaggcgaacatcatcagctggtagagcagcagaccgagctgcggccggaagatctcggttgcggtgacggctgggtcggcgacgagcgagcggacgccggcgccctcgtcgcggagctgcttgtcgaggctcgcggctagcaggtcgacctggcgcttcgagacatcgtagctcttgagcgtcttgacgcactggaggtcgctaaagtcgatcggaggcgagtcgtcaccgaggaaggaggaggtccacacgatgcgcgaagcgtcggtgaagggcgacgccttgagcagcggcaggagggcttgggtctaccaccggccgacagatgccgtcagtcaaatggcgattggacaaccggtagagtcaggcacgcagagggacgtacgatgcaccagtgcgagaaagtgttgcactgccagacccagccgaggccgtccttgtctgaccgccagccggcgacctgcttcttgaacgccgggtcggtgacgcccttgatcgggttcgtcgcaacctcgtacagcgccgccggccaatcgataccgccccaagctccgacgccggcattgttgaacaggtgcgtgatgtaggggtagctgcggccgcgaatgaaagggggaacgtggtcagcgcactggaaggcagactcagaatgcccgaaaccgccggacgcacttgtcctgcaggcgcatcacaaagtcgtggacgttggccatctcgctcaggtcgagctcctcccagacaatctcgaccgtgcccatcaggcgcttgcactcggccatcgagtgcaccttgtgcacgagctcggcccgcagcgccttgagcagcttctgcttggccgccgccgcgcgctcgccggaccgacaggcgaggacgagcgtaacgccactgttggggaagatagggcagtcgtgcgaggtcgcgagcgtgggcgagatgcggaacggcttgatctgggcgaacgagtcggccggctggcggtatgggtcggccgaggcgacgacgacctggagtaggaagcgcgttgcgatgccgagaccgatgccagagttggcgccggtcacgacagcgtacacgcgaggcgcatcctcagtagacatggcaagaggctcgggctacaagggagcaaaggcagagaggacttcagtacgagcagcagggcacgtcgcgggcgccgggagaggagacgcgacggaagcgccgaaggcgttgggcagcaggcaccagcgggccgctcaaagggacgtagcaccgcgacgtacatctaaggtaggcgagagccggcgaccgagcagaagagcaggggacctctgtaaacaacgaagaggagttgtagttgagggctgagtcgtcctgttggccgagttgcttcgtccttcggttcgccaaagctcgatcgcatctcggcacgccctggcgacaggagacggcgagggcgaggcagcagcagtcggcgcccaacactcacgccgccctcagcctcgtagcagctagtccatcgtgcgtaagctggtcgtgtgtgacacgcgagagatacgacccggcagtacctgacgccggaacgatcctgctgggcccagcttcagctcgaccgccgaccgccctcggccggcctcctcgcccgagcttctcactctcagttgatcgttcggccccagacacgatggcgacgacctttgaccagcgagccaagctgcacacgcgattgctcacgctgcatgagctcgtgctctctcaggaggcctccttgtcgtacgtcggcttcagaagcagtcgcccgcctaccccgcttgccagcccgctctgacctccctcgacctcggcccggcccctgcaggacgcttcaatccgagctcggcgccttgctgtccaatccgtctggtcttaaggagcttcggatgaccgtgacgggcctcgtcgactcggatccgaccttccggcgccgagctgaggagctcattgcccagcgcaagcaggccgaatcatacctccaggaccctccagaagacgggtcgaagccggcggtgaccagctcggctggctctgctcagccgggaagcgcaggaggagaagacgaggacgagggcacgcttgtcctgggtgacgtctcggcccgctcgagtatcgtcccggacgagcagccgtcgacggcggggactgtggcggcagcgccagccttcgagagctccccgctcaagaagtcgctctccgtcgagccagacgatgccgaagccgaagtcgacgtagcggacgtcaagatggccgaagagtcgtctgcagctgcgctgttaagtatgagcccagaggcctcgccagctcccgtcgcaaagaagccgtcgcagactctgccggcctcgcaagacacgcacgtctcagccacgccgtcgccgccagccaagcccaagacgcttctctccgtttcgcctgcgaaagcgactggcaagccgccgtcaaaggcgagtcagcggacgccggctacggctgccaaagcaggcgcgtccacctcgaaaaccggacgtacgtccgctcctctgacgcccagctcggccaaggtcaaggaagagaagaccaagggcaaggcgatcccacctccgcacagcccggcgccgagcagcggcttctcgagcactggcgagaccgaggacgagagggacgatgcggctgcggccgagtccaccgccgagagcccggcgtcggtcaagcgaccggcgcccaagaaaggcacaggcaaggctgccgtgggaaaggctcgtctcgcttcgccagctgtctccgtttcgtcggcaggcacgtcgcgctcgggcttgccgcgcaagagcaaaggtcgcgacgtcagcccggccagcacggtcgcgagcgtcagcgccaagggcaagggcaagaagaccgtcaagggcaaagcggcgcgcgacgacaccgccgttgagtcggcgtccggcatcgaggaggacgactcggacctcgacgatgaggaggatgaggaggactacgactctgagccgatcaagcggacggccaaagcgacggccgcgcggatgcgcaatgccaagctgcggcgcgacagcgtcacgcgctcaatcacgggctcgcaggccgggtcggtcgccggcgacgagctgacggacgagcagaaggaggccctgcacgagcagaagaagctcgagagacggatcagggaccgcgcccggcgcgagcgcgagcgcgacacgaaggccgtcaagaaggaggaggttgccaccagccgatgtacgtggaggcgtggagtaagaggcctctcctgagctgactgttgagtgtctctcgcctctctcagcataccgcgacaagaagcgcaagctcgccgaggaaggcggcgccggcaccggctcgcctgcgggggcgtccgaacggttgacaaagcgggcgcgcgaagacttttcgcagacgccggacgatggtgcgcgcccctccgtgcggcagcggccgttgcggtcgagagcctgatgtcaccttcttctcgcccagctggaccgtcgactgcgaccggcacgcggcggtcatccgtctcggcgtcggcggcccctctgccagcctcgctctcgaaccccaagtcgttcaaaaagacgatcgacctcctcttccagtcgatctcaaaccaccggtcgtcgtcgatcttccaggtcccgattcgggccaacgacgcgcccgactaccgcgacattgtctaccggcccatggacctccggacgatcaagggccgcatccgcgatggccagatcagcaccgtcgacgaatttgagcgcgacgtcatgctcatgtttgccaacgcgctcatctacaatgacccggagagcgacgtctaccagcggaccgaggaggtgcgtccccctcgtcctgtcgctgtcgttaaaacgtaagctgacccgcgacaggctctctcttcgcagatgatggccgactcggaggagtcgatccgacaattcaggcaactgcagcagcggcttgcgagccagcaagagtagccccgagacgatgtccaatgctcccttccttactgcacggcgactgttgtgaggagcgcatgcgatcaacgcttattaaaggtgccgtgccccctcttgccgcctgtggtattggccttcttgctccgcttgccgttgaagcgctggcgggcggccttgatggtcttccagatggcaccgccgcgaccggcgccgccgagcccgcgcttgtcaggcagggcgttcatcgacgccttgtggctcttggagaagataacgacgcggcccatgttgcctgcccggccggcccggccggcgcggtggataaagtcgacggcagttgtcggctcgtcgaccatgaggatggtcgagacattgggcgaaaagtcgaggcctcggctgaggactcccgtcgtgaccatgacgcgctgttccgagaggaccgggtctggcgcgtcgacgtcgaccctgttgccgatcgcctttggcgacgttttgactggcaggtgcagctttgggtcgtgcttggcctcgatcaggccctggagctgctccctcgggttgacgaggaagtcggaaacgtgcttgttggtcccgcgcttgcgcgtggccgactcggacgtcatgagcaggttgccaaagcccttctcggtcaggtactcgttcaggtcctctgctcggctcgtcttgttgacgaagatgaggacctgcgagtgctcgttgccgtcgcgggcgtcctcgacgaatgcgcgccggatctccatcaggacatcggcccgccagttgccgcccgaccaagcgacgcgggcgaccgagagattatgcggcagcttgtgcagattgggcgtgatgagccggaccgtctctggatgccgctgctgaaggaagcgcgtgagcgtctcgggcaccgttgccgtcgcaaagatcgcccgaggcgggggcggcgactgacgccgcatgagcggctcgatcaccggcaagaggtcttcagcaaagtcgcggtctttggaaagcagacaggaaggcgtcagccgaagtaagggagaccaagaaagggcccggacatactgagtgcaacgtcggcctcatcaaggacgagccactcgacgttctcgaggctgaggagcttgcgcgcggtgcgctcccgcttctcgagctgcgatccacgcgacgaccagctcggcttcgcgtcgccggcatcctcatcggtgagcccggccgcgttgcgcgcgctcaggttctcggcccatgtcagccgcttgtcgggcatccagcgctcccggctgtcggtcggcggcaggccctcgcccctccagggtccgtcgaaccatttccgagcttgctcctcctcgcgcttgatcaggctcgcgagcgcggcttcctcgcgcttgagaccgctcttgtccggcttctggtcgcggagggtcgacatgcccatgagctgccgcacgcggttcatcgtcccgacgaggatgtcgcagtctttgaggccggacgcgccgtcgtcgtacgaggcattgccggtcgagaggcagccgacccgcagcttctcgttgtggacaaacgccttgaacgtggcggcaatttgccgcgccagctcgtgcgtcggcgcgaggatgagtgctcgtggccgcagcttgatcaacaacgcctcagcgctgttctcgctcgcctcggcggcctcgccttccccgacttccttggactcatcctgcgcccaaggcagctcctccgagttgcgagccatcttctccgtcatgcgcctctcttccgcctccttgaggctctgcacgacgggcaggatgtaggcaagcgtcttgccgctgcctgtctcagccgcgaagagcgtcttgctccctggcaacatgccccggggcagccaatccttcttctgggcctgccagtcggcgagcttcgaccctgctgccgggctgcccttggccgaagtcgatgcagggccctcgcgcggcggaaagtagtgcgcgaggacgagccgctggatgggggtcgcagtgaagacgccgcctttacggtcgacctccttgcgcgtcgactcgaggtagtcccggaccgaggagaagaggcctggccggagcggcgggtgcgagaagtgctgtggcagtccagagagcgtcgggtgcgagacgaagtgggacgccgtcgttggcagcctgcgaatcggctcaggcttgaactcgaagacctgtcgggcctcaatcttatcgggcgtagaaagctgtattccgctccggtgcgcggccgggctctgcgacggcgtgtggacggcagacgaagcgcccatgacgaggttggacagctggacgacgggcttcaccagtcgccgtgggctcggccggttgaccgccggcggcttcttcatgcccgccgtcgaaggaaggaagcgtatgggcccagctacaggcgcacctttgtaatgtcgtgaaggtgtcagaagcgacgggtggacgttgccccggtgcgtgaggtcgttcgacaagcggtccttgggcttcatgctcttgactgcgggtgggtgggaagtcgacgacgacgaggaccgcaacttgtaaacgttctgacctcccaacaagagtagcatgcggcccactcacggtccttgttcttgcggcccctcatgccgaggatgaccttgcgcgccgtcgtcggccggagtggcctcgcagcgagcgccggcgacgtgacgtgcagctggcggacgactggcagcggcagcgtagggctcacgagccctacccggcggaacgaccggagagggagcattctgacgtagccagagttgaggaaccgagagaagagcaagatcgagaggggctctgtgtcgagggcgagggcgagaagggcagggcaggtggcagtcgggagtcggaggcgacgactttcgcctccacctttcggcaggagctcgagccgtgcttccccttacgaccatcatctgaaccctccctttctcctctaggacagcagctgctgcaggagagagctctccggactactgccgatgtcgcccctcgcctcggacctcctccgggccgtcgctcgccaggcggtcggcgcgacctggtcgtcgtcgttctcgtccgtcggcctgcgcgcgttcgccgccgccgtgacgccgccgctgcccgagccggtccagctgccattcgagtttgcccaaccgacaaaggcaatctcggccgagggcgaggcgtttgtgattgcccatgggctcttgtacgtagtgtcggtaggaaggaggcgagctcgtcgaaatcttgggctgacttgggcctgcgcggctcggttgactcgcagcggctcgaagcagaagtacgtcactcggtgcacacaagctgcatgtctcgccacgtatcctgggacgcggtagggcgcaggaattgggcggaaagctcgtcctgggcgcgctggggccgaagagatgagggcgatgacggccggacacgattcggttgggtgaagtcggtcgccggcgacctccgagctgaccctgctctctctctctctctctctctctctctctctatagctggcgatctctcactaaggcctttgcgcaggacctccagatgccggtctatgccatcgtgcgcctctcgctcgtccacaactctcccttcgctcgctgacagccccgtgcttcgccccgctcaaccctctcgcgccgcctcaggacctccggaaccacgggacggcgccgcatgccgagccgcacaactacctggcgatggcggccgacgtcgggctctttctgcgcgagcacaagctgtcaaaggttcacctgatgggtcactcgatgtcagtctcgtcacaatcgcttgcgttcgtcctcacaggggagtcagcgcagactttgcatcagaaccgactgactctgtcgcacaggggcggcaaggtcgtcatgacagttgcgctccacgaggagctcaacaagacggtgtcgagcctgatctcggtcgacatggcgccctccgagggccgaatctcacccgagtcagtccgctttgcccaatgcactgactgcgcacgatacaaggctcgacgagtttgctgacggccgtcattctgccctcaccaggttcaaggcctataccaaggccatgatggctatcgaggcggccggcgtcgcaacccgggccgaggctgacaagctgctcgccgagactgagccggtgagtcggcaaacactcgtgctgctcgagggatctgcccagctaacccctttccattcctctacgatctaggccctacccgtccggcagtttctgctgacgaacgccgagctcagggacggcaagattggctttcggaacccgctcgcgatcctcgacggcgcgatcggccggatcggcgagttccccttcaagacgggcgaggtcagctggcaggggccgacgctcttcatcaaggggacgaagagcgcctacatcaaccggcacaatgcgccgcggacgaaggactactttccaaactctgttcgtctgcgcggtcgtcgcttctgcctctgcgtttgcttaccccgagtctttgattttcacgccgctcacgcagtcgattgccgagcttgagacgggccactgggtgcatgccgagctgtcagtcgctctggcgtctcttggtgtgccatggaagacggtcccgctgacgctgtcgttcgaccctcctcccgccccgctgctaggccacgaccgttcatgcggctcgttggcgagttcatcaagggcctgagggcgcgaggctgaggagcatctagacgactgagtaccaatgatagaggcatgaagactgcatgactggtcgtttcggtcgggcccgcgactgcttgggttgaacgggttgtgagcgtgagaacctgctcttcccccccaacgcttcccccgagcgttttgggccgcaagagccgacgacatctgccgctgcctccaacccccatctgctgccacctacgtcgtgtcgatcggtggctcgtcgttcgcgctcgttcctgctattgcacgacctccacctcctccacctcgtccttttgtcgagtcgcgattgtctgttgacggaagctggtgctcatcctcgttcattcgccgcgaaagtagtggcggaagctgtcgtctttgggtcgtgccgtcggccggcggcatcgcttgtccgtgggcggtgggctcctgctcgccctccactttctgcgctgaagccgccgtcatcgccctctcttatattcgggggcagctcaagcaaagaccatctccttctcctcctaccatcaccttccccaatcccatcaccccccacttcccatctctatttcagccatgtctgctgccgctctcgcctctggatccaaggttcgtcgcggctgcgcgcgcccctcgacagctcgacaagtctcagctcagcccagactgacgacgtctccttcctccgatgcaggtcctcgtcaccggcgcctctggcttcctcggcatccacgtcgtcgactcgtttctcaaggccggcttcaaggtcattggcaccgtccggtccgactcgaaggtgcgtcgaaaaacggcggagctcaggtcaggctcgttggctgacgacgctcttcatctctttgctccctcctctagggcgagtatatcaagaagcagtttgagggcaagcccttctcttacgtcctcgtcgaggacattggtgtcgagggcgcgtttgatgaggccgtcaagaatgttgacgccgtcgtccacaccgtgcgtgccgttgcggcgagcgcagctgcccttcgcctgttcactaacgcccatttcctcccttccctcaggcctcgcccttccacatgaaggccgacgaccccgaagagctcgtgcggccggccgtcgacggcaccgtgggcgtcatcaagtcgatcaagaagaacaacgccgacgtcaagcgggtcgtcatgttcgtcgcccttaagctcgtctagctttggcaaggctcaagctgactttttgactgcttctttccaacacagcacgtcgtcggtcgccgccgtcatcaacaacaaggacgctccatacacttacacggaggacgattggaacgagtgggcaggtcccgagtgcaaggagaagggcaaggaggcctctggtgccgctaagtacctccattctaagaccgaggcagaactcgctgcctggaaggagtgcaagggagcgctagagctcgtcacgatcaacccgtgcatcgtctgttcgtgaaattggggttcttacaacaacaatcgtccagagactaatcgtcccttgctcttcacctacagacggacccatcctccacgagtgtgactcggccgacaagctcaacacgtctgtcgccaagttctacggcctctacaatggccaggtcaaggagtcggaccttcccggtggcggcaccgactacgtcgacgtccgcgatggtgcgtgcgagcgagcgactgtcccttacagccagagtgcctcaactgacgactgcgcttcccctcccccttcgcgcagtcgccgacgcgcacgtccttgcgctgaccaaggccgaggcggccaacaaccgcttcatcacctcggcccggccctactgcatgcaagaggttgccgacatcctgcgctcgcacgcgcccgagctcgagggcaagatccccaagggccagcccgagcgggtcgacgaggtcaacgaccccaagacgatgtcggtcgcgagcggcaacaaggtgaccgagaagctcggccttcagtaccgctcgctcaaggagacgaccgtcgacatgtacgagtcgctgaaggcccgcggcttctaaacggagaccttgctctactgtatccattgcgactgctcctattgattgccgggttgtgcgagagtgcagagcaagcggcaggacatacttgcaagcggccgctctcctcgtctcgctcaagcagagcgcctcccaggccctcgaggttgtctgtttgcgcgactgcgcgcggccgacggcccggatgctcacaggcaggcgtgggccgacgaaagtaaaataaaataaaagcttcgatgacgcgcacggacgcgcggccaaagctcttgatccgtcgtcgccttcgactttcctccttcgccttcgaccctcaccctctcaaccttcacccctcttcacgttctccctttcacgcccgtcatgagactctcgctcgccaccgctctctcgctcaccgccctcgccggctcggcccaggcaaactggttccacaaggaccccaagcgtgcgtcgccagccgtatctcgcgcgcgccatctcgcgcccgcccccccccttcgcctcgatgctgacggcctgccctcttctcgactcgctccagccgactactcgaagtgggacgtcgacacgctcacgacctacctgaaggagaagaacctcaacgtccctgccggcacgccgtcgcgcgatgagctgtccgtcctctctctcgtcgctcaaccatcgtcggtggctggaggctgaccccgttcgatgacgcgctttttcctccctttctccttccccttcgatagcgtccggatggcccagaacgccttcgacgccggcctgcactactctggccgcgctgtcggtgatgcccagggtgtctacgccgctctctccgagaaggctatcgactcgtgcgtgccgtctctcttgcgctcgggccatcgaagcacgtgaaagactgacgctcatactcctcgcccatctcccccaggtggtccgagtccgacctccgcgagtacctgctcgtcgccggtgtcgtctcgcctaagtcgaccccagagcagatgcgcgccgccgccaagcagaagtacgccgccgcctcgcaggccgtctacggctcaccctggtaccaagcgaccgagagcatcggcagcgctgcctcgtcgatctcgaccgaggcctcgtacaccgcctcggtcgtctcggcttcggtctcgtcggccgcctccgaggcttcagttgccgcctcgagcatctcgtcggccggctcctccctctcgggcaaggccgccgcttcggcctcgtcgctctcggtcgaggccgtcaagtcggcttcgatcgcctctaagtcggcctcgtcagcctccgtctgggcctccaagtctgcctcatcgctctcgagcgaggcatccaagtctgcctcgatcgcgtccaaggctgccgccgcctccgcctcctcgctctccaaggccggctacaacccttcggccgcctcgaagtcggcctcgtcgctctcgaaggctgccgccgcctcggcctcgtcgctttcgaaggccggttacaacccctcggctgcgtcgtcggccgccggctcggtcgcctcgtcgatcctgaacgcgccggtcaacaccaaagattacgtctactctacctggtccgacagccagcttcggcagtggctcgaggacaagggtctcgttaagacgcacgctcaggcgacgcgggacgacctcctctccaagattgagaagcccttcctcgcctcgcaggccgccgtctaccactcgtggtccgactcgtacctccggcactggctcgaagcccacggcgtcatcaagacgccggtcgaggcgacgcgcgacgaccttctccgcaaaatgcaggccaactactttacggttgaggacaaggtctggcactcgtgggagacgtcgcagctccaccagtggctggtcgagcacgacatcatcaaggaggcgtccgagctctcgcgcgagaagtacgagaagctcctcggcgagcactacccgaccgccaagtcgaccctcttcagcgcctggtccgactcggacatccgccagtggctcgtcgagcacgagtgtcagtccctcccttgcaggcattgcttcgctcaagcgccgtttgcttacgcctctcctccctttttcctcgcagacatcaagtcggacgcccagctccgccgcgaggatgccgtgaagctcatctctgacaagtaccactcgtcggcggccgcccccggctacctgacatggcccgacgcccggctccgcgcctacctccgcgaccagggcatcgacgacaccaagtacacgagccggccgtcgctccttcaggaggttcggatccgctgggtccagacgcagaacgcaaccgactcgctcctcgcctcgatcaaggactcgctcgcctcgggcgcgacctacgccgaggacacgctcgcctcaatcctcggcctcctgactggctcgggcaaggctgttgaaaactcgctcgagtcgttcctcgccggcgcctccaagtcgggctactcggccagcgccgaggccaccaagtactcgaagtcggctgccgccgccgcttcgtccgcctcggtctcggccgcttcggtcgcctcctcactctcgtcggtcgccgccaccgctgccccgtcgtcggcctcggccgcctctgcctctgcctcgtcggcctccaagtcggccgcctcggtcgccagcgtcgcctcgtcgagcgcctcggtcgctgccagccagtacatgagctcggcctcgtcgttcgccgccgccgcctccaagtcggcctcttcgctcttctcggccgcctccaagtcggcgtcgtccctctcggccgccgccgcccgctcggcttcgtcggtcagcgtcgagtcggccaaggcctctgcctcggcttcggccaaggtcaaggccgagctctaaacagcagcctcaccgttgctcgttgtcgactctcatgcccttccctttcctcctccccctgtccatgatcttgctccgtacgcctcccttcccgctgccccctttgagcggccggggtgcgcgctaggcccgcccgacgtgcccatccactgtatcgttgaatgacttctctgcttccatctcccgtctgctgaaagagttgcgaatgcgaacggaagatgacggcgctcgcgactgttaaaggacgagagcccaaccgcatgcccatacggggcaatatgggcggtctgggctttttgcggccgctcgcacgcgacggccgtctgctcctcgcgaccctcctcccatcgacattcctccctctctcctctcctcagccctgtcaagcgggtagagcaggctctcgcccatccggcatgtcgcagcctcctccgcacaatccgatgccggccggcgtccgaccgcactcgcctgcggtcacgacccccggcgggtcggcagcaccgacccgaccgggcgagacggacccggcgtacaacgacgtcgtcctctcgttcctccgcaagaggggctaccagaaggccgaggaggctctccggcaggacattgaggccgccaagcagaaggccgctgcagctgcagccggcaacgcgtccggctcgggagcttcaggcccgacggccggcactgctggagctggaccgggagccggggccaacgccgctggaggagggtcgacgacggctgtaggcgctgctggagcgcagggtgccgccagcggagttccatctcccgctgctggtggatcaggaggagggacggccggggccaagcctgcagccagcggaccgcaagctgcggctcacggctcgcacaccgtgcccctctcgcagcttgttcagcgcaacgccccacggctgtcgaagcagcaagcagcgatcgcgggcaattcgccgatctacgatttgctcctccagcagctgccgtcgacggccttgcatggcctcggcttggccgacgtcgctcgcgagaaggagcgtcgcgagcgcgaggagaagatcgctggcgcggtcgcggccggcccggcgggtgtcaagaaggacaacgtcgccgacgttgaaattaagctactcgatccgcaggaacgcgtcctcggctatgagggcatccgcgagtgggtcgagagcgggctcgaagcgtggaaggtgcgtcttgtcagagcgatgtcaatggcgcgagttgcgcaaccggcagccgctgaccccgtcgacgccttcaatccctcaggacgagcttcggccgctgcttttccccgtcttcgtccaaactttcctcacgctcctctcgacatcctttccacttctcgcgcggtccttttacgtcgcccacgcgccggctcaccacgcgatgcacgccgtgacgctttcgacgctcgccggactcacgtcagccgcccacatcgccgcgagtccgatcgcgcgccggttcagggaggagaagtatgtcgtccgcatgagtaagggcggcttcagcctcctctgcggctggctcggcggcggcggtgtcgagggcaattgggaggagggcgccagcaaggctcgcggcaaggaggccgtccggagtcttgtcaatgagcacatccgagtcgatggtcagtcacgccggcagcctggtgtgctgctgctcctgtgatactgacgcactgaccgccctttcgccctctaacctctcccagtcgcccagcagacgcagccactcacctcgctcgaactcatgacgaacacgggcctcgtgtcgtcgcatattccaactccgcagaacctcccggtcgccaagacagcggcgatccaggcctcgccccaggcgttcaacgcatcgcagccggcgctcaagctcggtctccctccgctaggcgagaagctcaaggaggaggtcaagaagattctccggaccgaccgggtcgctgcgccgatggacatcgacatcgacgagaaggaagaggcggccgtcggcgccgacggcaagccgctcgctccgcccaaggacgaggacctcctgccgatgccggtcaacttccggacctttgacgtcgctcgcgaggtctcgcgcattgtcgactcgcgcaagcggcttcgactcgggccgatggccgttccgtctgcgatgacaccggaagcccgctgggaacctggcgtcgagggccgcgtcgtccttccgagcatctgcgcctacacgtttgacgacaacggcgagggcatcacgtgctccgagttctcgaaggacgccagcctgatggctgccggcagcgaggagagctgcgtgcgcctatggagcctaaagggcgagaagctgcgcggcctccggagcgactttgatgcctccagtgtcaaggacggtacgtcggctcactagcatccgtcgctgtgcgtgcccgcggctgactcgatcttgacgttctgctcctccgctactcagcctcattgctgaagaagacgagggaaaagtcggcgccgtcgatgcgcaagctgatcggccactcggcgcccgtctatggcctctcgttctcgcctgcggccggctcggccgcgccgccccgccacctgttgtcggcctcgggcgacggcaccgtccggctgtggtcgatggacacgttctcggccctggtcgcttacaagggccaccaggaccccgtctgggacgtcgaatgggggccgggcggcgtctactttgccagcggtgggcgcgaccggacggcccggctctgggtcgccgaacggacgagcgcgctgcggatgtttgtcggccatctcggcgacgtcgacgtaagtcgctctcactttcacacggttggccgccaatgagctgaccccgaggccttctcgttccgaaccagtgcctcaaattccatccgaactcgctctacctcgcgacgggctcgagcgatcggacctgccggctgtgggacatccagcgcggggcctgcgtccggctctttgtcggccaccatgacaatgccgtctcggcggtggccatcagcccggatggccgttacctcgcgagcgccggtgagccggccgctgtccaatatgtcgaccaatcgccgattgactaactctgactcggcttgtccccctgcagccgaggaccacgcgatcaacatttgggacctcggctcggcccggttgatcaagaagatgacgggccacacgtcgtcgatccacagcctgtcgttctcggccgagtcgtcgcttctcgtctcgggcggggccgactgcaccgtccgggtctgggacgtcaagagctcagcccaggaggccgacggagtctttggcgcgccggcggccaaggagagcgcagtagcgacgcggcggagcagtaaaatcggccccgtcgccggcacgacgctcggcgagttgcccatgaacgacgtatccgcagcggacgatgcgctcaatgctcacgtcgtcagcgacatcaggtgcgtcccggtccagcctcttgtgagcccgtcacaaattgacttgctcttgactctcacccgcagcggctccctcctctcgacctacccgaccaagcggacgtccatcctcaacgtccagtttacgccccgcaatctctgcctcgtcgccggctataccctccccacgatttgatgaccccacgccctttcgagactggactcttttcgttcttgagtcgaccggaagtgccagaggagcgtcgtcacgctcgtgcgtttcggccgcctagcccgccgcgccgccgccctctcctttcctctccagcccgaccggccggaacagtctcctgtcgagccatcaccctccctctcttcatctcgagaccgtcattgtagcgccatctaccagtcgcaggatgtctggatcgttcccaaaggcgacgcattacgagcaggcgctctcggacgccctgactgcgggtgcctgggcggacgcaacgccggccacgagcgtcaagggcgacgccatcagctgggccgagcttcagcgcaagctcgcaaagcactcgggcgacagcataggtgcgtccttaaacctctgagctcccagttgggtgtctggcatgggcggggaagcctgggcgaccgccggccagacggcgcgacctcgagtcgggatgcgcgatgagatcatcccctacgggagatgaggagccgggcgacgccatgcagcaagcgcgagctggcaggtcgacctagcacagggagagcgtcgattaggcagccttcatgcactcctctaaggctgctgctttgctggaccagggcatttgagctgaccgagcctcgctccctcaatcgtctcctccggcagccggcgagctggcgtcgcacctcctcacgctctcgctcctcctctcggccccggcagtgccgctgcctgagactaccgtcttccctcatcacacccccatccatcgcagccggccgatcgcatactcggaaggctcgctcgcgacggtcgccgacctcgacggtgacgagccgctcgagctcgcacggcttgttgcgctcgacgccgagggccgcgattgggctcagttgaccgttggggaggatggtcggtcgctagtcgagcagggcctggcagaggtccaggcgctgcgacagaaggcaaagcacctgagcgatcaggaggtcagcaatcgctttctccctcgcaatcgtctcatcactgactcaaccggtccaaccccgcaccagacggccactgtcctccttgctcagtatcacgtcgcactcggtcagattgcgccagctctcgcgctgctttcggggattccggcctcgccgccatcaacttccgctccggccgctgcctgggcccagcgcgtgcgcgcgctcgtcttgctcggaacctgctacgagctatcgacgccagccaacgttgatggcgcgctagacgtttatggcctcgcggtcaaggtctatgagggcttcccggggctctcactccctgtggttggtagcaagcctctcagcgcaggctcgttcaaccgtctgcgcgagctgcaccgctgggccgagcgggccttctcgcggctctgcttcatctcatcatcctcaccatcctcacactcggacacgctgcgctggcttcaactctgggcgacgtttgagcagatttatccgccagccttccgcccgcagcgccggctggccctccgattgctgtacctccgagcgctcgccgtcgttcggccgtcggcctggaaggcgctggctcacgggatcatcaagcgcggctcagaagcactgaagggcgaggcacggccgtttccgagcgccggcgagatgcggcacgaccttgaggagtgggtggagtgctgcgtgggcatctggcgggctgccggcgagccgcagctgcttggcgcagacgtttcccaggtgcgtgttgcaccccttccggattctagccaaacgactgatctgacttcggacgacgcaatctcccttcgcaggtgctctggtggacgacgacacagacctttgcctcgcagccgacgctccgccatcttacgcgcgtcctgctcgcgctcaacccggaggacccggctgatgctcgccggacgttcaagctctacgtccagctcgtcaccaaggcccgcgagacggcccgcggcgacctctcgatcgtccacaactcatcggcggcgacgccagccccgccgacgccggcggtagagaagatggagggcgagttgggggctgccatggaagaggagggcgacgacgaccgcaccttcttcgaggcccttctattcggcgcgcgcatggcgggtcgggactgcggcgagccaaaggtgggactcgactatcttgacctggccaggaccgtcctggccgagtcgaaggacggctcgctcgccaatgtcgccctccggctcgagctggaggggatctgggagcaagaacgaggctgcctgctcatggtgttgctcgagcgcgcaccggagccgacctcgcggccgacggtccaggccgaggcgctgaagcatttgatccaggcctcggtcctccttccttcgtcgtctcgaacgttctttgcgctcgcccacgcccaggtcgtctgccgccagatcgacgaggcgaccgtcgccattcaatccgcgctcgagctcgacccgggcatggtcgagggctggcacctgctcgcccttctgctcacggccaaaggcaagtgggccgaggcggccgagattgtcgaggtcggcctcgacgcttgggaggaagaagacgaggacgacgtggcggcagcggacggcttcgatgcccccgtcgccaagcgcgactttgccaacgagaagcagggcctggaggacgtgtcagacactgcaccggcaccgatctcgtcgggcggtcggctgccagccgccgggtctctcctctccgcgacaccgtcgagcatcttcctccggacgaccggatttgccaagctagaggcctttctccagctgcggatgacgcaggccatcctcgtcgagcggctcgagggaccggacgaggcgctcgagcttcagcaggccaactttaccttcttctcagtccgctgtggccggcaggtggcgctgcctcgagctcccggccaggccggctcgctcaagtcggtcgcagctgcgccagccgccggtctgtcaatcgtcgtcgatggcggccacgagaagccggcgctctcgatcgacccgtcgcggcaggcggtcaacggcgggaaggctcacctcgaccgcgacgcgcttggccatggaagggaggccagctcgtccgcgacggggccgagcacgatcaacgaccaggaccctatcgagcagcagtttgccatggtctcgagtgcgcaacgccgtcgtctgctcggtctctgcgcgcactctttcactgacgctccctctctttgcagtcaaccccccgacgccagacggaagccaagttgccggctccttcaacctcgcggtcgaagactcgacttcgcctggcgggtccggcgctgtttcgccggcgtcgagtgactcccccgctcgctcggagcgaagcaagcctcgtttcctgccgcgccatctcgcgccgcacggcagctcgcgccggctcggcggtggcctcggccgctcggcctctctcagcaaactcgccaacctgcgccatccatctggtccgtcaattgtcagtctcggccgctcttagagttctgactctgacacccctttcctcccgtcttacgcggctgcagggtccaggaatgcgagcgacagcagcctgcgcagcttctccaacgcctcctccatccatctgcgctctcagcgccagtcgccgacggcatccactttcgagggctcgatgccgccgccactgccgccgcccgcactgccgtcttcctcaccgtcagcgcctcaagcgtcaggctcaaaaagctccgatggcgtcgcccgccgcacggcgcgcgaggcacgcctgctcagctcgctctggctcatgagcgctgcgaccttccgtcggcggggcaagcttgagcaggcgctaggagccgtccaggaggcagaggtactcgaccagacgaaccccgaggtttgggtccaggtgcgtaaatcgagtctccccttccgctcaagactgcagccgctgactagcgctgcccgcctctccaccagctcggcctctaccatgatgtgctgtcagcgcccgagcaggcaatcgcagccttcctcaagggtctcgttcaccacccaggagacctctcatgcctcgttcacctcgcccggctctacctcgtcaccccgcccctcgcctccaatggcgacctcgcccatggcctcctccacgccgtcacgcagggcccgcaaggatgggactcggccgaggcctggttcttcctcgccaaggcgtgcgaacggcaggacggcggaacgggcgctcgcgccggccggagacaggagtgtctggcgttcgcggcgaaactcgaagagggccggacggcgaggcacgtcagcgtcgctctcggccgctgggcgtagatgaggcgtgtgctgggcatgaaatgatcctttcaaaccgacgaagactttcagaaagagaggggcgactcgtttacaactccacgtgacaataccgtctgcgagcaggcacgattgtgctctaccaagatcgaaagaccgaacacggcggagccatcatggtgcgctcagcagcctaggcaaagcgggcctggaggctctcgtacactggagagacaggcgtacgaaggcccgatccgggtcgatggacgtcagcgacgttcgaagctggaaagggggggagcctggcgcaacacgcactgtctttggtgcagtcgtcaaaggaccggtagttgaggccaagctccttctcggctttcgcaccgctgctgacgatagccttgtctagcctgatcgcctccttcaggaccttctcgtcgacggccggcaggctcaccttgagcttctcgtcggccgcgttcgccctgagccactctgtaaactggccgttggcaaacgggcctgccgagacaatgtagcgctcgccagcggcctgcttgaccgtcagcgcgaggacgtgggcctcggcgacatcgcggacgtcgacccagttgccggccgaggacgtcagggatgacatctcgggcgcgggcggctgggtgaacttgtagaagccggcgaccgaggtgttgagcgacgaggggtcggcgcactcgtggagaatttcgccaaatacaagacatgggttctgaatagggcgcaagggacagggacgggagggcaagttcagctacatgccagctaagggggtaagagcggttaagagcgacgcacaacggtgacgagcggcaggtcgtgctccttcgagtacttccaagcggcctcctctgcgagcgccttgctagccctgtacgcgtggaaaggcccggcctcggcaccctttttctcgacctcggcgatcgaaaacttgttgaagtccctctcggtgaaggtctttggcggctcggccggctcgagcaccgccgcgaccgagctcgtgacgacgacgcgcctgacggccttcgcatgcttcgtgatcgactcgaggacgccaaccgtgcccttgacggcgggctcgatcagctcgtttgggtccttggccgagaggtggaagggcgaggccgtatgggcgacgccttcgatcccggcctcctggaggcaggcatcaaaggcaccgggcgcagcgatgtccttgacaatggcgtacgtaaagggctggccgacgaactgcttcttgaggtactcgccctgggtagatcgtcgtaaggcagtcgcaggagaagacaaaggagatcagagggtttagcggaggggatcgctgggcaaggcctttccaagcgttcgcgcgcaccttggcctccgagcggacggtaccgacgaccttgaagcccttgtcgagaaaggccttgcacgtctgcacgagcaagcagggtaaaggcgactgtcagctgatcccgcactgttgaggtacggcgtgtgagcgctcaggacgcaacccagataccgatgaagcccgaggctccggtgacgaggatctggtcgaagggggcagatgtcagggccgtctgatctttgtgcacttggcttcggatcgcccgagcacgaaggggagggctcggcaagaagggtcactcgagacgctgcaacttcggaggcgcgacgttcggagggacgaggctcggagggacggattgcgaatccgaggtccccggaaccggagaggagaagagtcctactcggcaagactagacgcaccttgcatccgggtgagggcatgctgctagatgacatcgttggaaagagagctagctggatggatggttgagggaaggacggacgagatgcaagacgagcccgcggcaaggcgctagccgtcgaggtgtcggcctcagccgaaggctcgccccgtttgagctctctcggggtttccattgaaatccgctctgggcaatgacgccgactcgttccggggccaagccagcgggcgggccggcctcctcgcctgacctcggccgccgcttgcctccttcctcctcctaccaaccctcaccaacactcgtatcaaagcccagggtcatctcgccccggcctccatcctcaacgacgtccgccctcggttagtcttgcccttctcgcaggagcccgagcctgctcgtcgcatgagatctcgcctgagccatcgctgattgcgcgcctccttcgtccccgcttgcgaaccctcacctgctgccatcagcctccgccgcccagctcggtctgctcgccgtcgtcgccgccggatcgaccgccctcgcatcaaccaccaacaacaaggacaccaccaccaccgactcgtcgtcgtcgtcgccgtcgaagcccgccgccgtcaacgctctcaacgtcccgctcggcccgactggtccccttccctcgtcgtccaacaccgccgactcctccgaccccggcatgttccgcaagctctccaagctcggcggcggcggctcctcctccaagaaggacgagaccaccaccaccgctccttcgtcctcgaccggcgccacccctgccgttgcacctgttcaggaggagctcaaccggaccgacgccgccctcgacccgacgacgggcgcccacccggccgtttccgacgaagctcgcgaagccgacaacaacgagcgctcgaccgccgacacgcctgtctcgcctgcgatcgtcgttccgacgctcgtctcttcggacaacgttgccgaggagcggcgtgagggcgagcacgagcaccgttccgaggggcatgagcaacctcagcaccaggagctgcaccacgctaccgaggccctccggatcgactcgagccctgtcactccttacgacggccccgtcaaggacgacggcatgatggccggctttgtgcctgtccctgtctcgcccgtcggcggtgcgcatgacgctggctatccgactgagaagttgtgagtcacctttacgggcttgcttcgaggcctcgcctgtgcgcttgtcggctgacgctcctccttcgcttctcgtagtgagcacgaggctccggagccaatgaccaacgctgccaacatccaggacgacggaatgatgaacaacttcgtgccggtgccgacgcacgtcccttcggcctcgcaggagcaggaggtcgagcacccgacgccgacggcggccgagacggtcatcgaccgcctgccctcggacgaggaccgcgagcggctctcggcctcgcagggcgctgccctcggcgctggcggagccggcctcgctggcgtcggcgcattcgctgccaaccagcaccagcacaccgaccagcatcagcaccagctcaccggcacgagcgagacggcgacgtttgaccatgcgctcccgcctgcgacgtcaatcacgcccggtctcctccaccaccacaagacgacgaccgaggatggcagtctgctcgaccgccacacgaggccgtcggcggtcgacggccacccgatcgccgtcgacgccgccggcacgcccgtccctgtcccggcctcggtcgccggtctctctcgcggcggaaccgtcggcggcggcacgggcagcatcagccgcaaggacctcaagaagattgagaaggccgagcacaaggacaacaagtcgctcgccaaaataatgaagagcgaggccaagcacgaggcggccgtccttgaggcagccatcaaggagctcgcgcgcatgcaggcgaccgtcaaggatgcggccaagctcgaggcaaagagcgcccggtcgcgcgacgagatggtcaagattgagcagcggactaacgcaaagttcctcgaggtcaaggccgtccacgataaggcggtcgccgagctcaaggccaaggaagaggagcacgaggtgcggcctctccctgcccttccgccctctggccaagaatatcgctgacgatttctcaaccgctctttttctgcagatcaatcagcgccagaccgagacgctcaccaaccaggtcgccgaccagacgcgcaagatcgaggagctccgcgcttccaaggcccgggacgaccgcgagcggggtgcgtccttcaatttcgccttccgtttctcagcttctcgcgcacggatgaccgggctgacgctttccatccttcattcttactctgcagccgagaagcttgccgcgatgaagtaaagccgccgccagaacgccatcgacccagcacgatactgtctttctagccacccttgcccctgcccccgcccattctccttccgcctaatcgtcctactcgccacttcctcggtccgacttcccttcacctcgtccccgttatggcggatgagtggaggtgtcgacggggctaatccgccctctcaaggtctcgcacgactccctcagcctcgactcgtagcttaactctctcccatctgatgaaattcgcctgttcttgtcgtcgtcaactcgccgggagcatgagctcatcgaatggttagaagatcgagggtgaatggggcaagcagaggaggacgcgtctctcctctctcggacgcgactgccttttgggacgcgaagcggagacgaagcagctcgagcagttcggatccctcaaccagcgacacctacatctgcccacccgcttttgacctcttcctaccactccaccagctcccaagaactctgctctctgacgctctctggcttccgcttctcacctctcgtttggcccgagatgagccgcaccccgccacgcgcgacctctgcccgttcccgaccggcctcgcccaacggggctatcaacctcgccgaccgcttcgccaacgtctcgctggccagcaccgacgctggaggcggcggaggcaaggggatatatgccgctccagacacgtacgtcgctgctcagtctcatggcgttggaggacctgcctgctgtggagctgtggctgacactccttgcccgctctcgacccgctcctccttccagctccaacgtcttcttctctcgctcgaaacactcgtcgacctcgtccgagacggccagtggctctgccaggccctctgatggcggcacgctctccatcactcagcacggcggccgcttcgacccgacggccggcaaccgcgacggcgacggtgctgagctcttccgcaagagggagccgtcggccgggtcgaacaagcatgtacgtctttcagccgaattgcgtgcgatttgcgagcatctgcgacgcgtttggaagggacggaccaagtgttgcagtggctgtcgtgttgatcaatggcatagcagcgagctgaccagctcgactcgtcgcttcgacccctccaggcggaccgttttattccgcagcgatcagccaagtcttcgatggccccgccaccgctgtcgtcgcacaacagctccatcgcaggctccgacatctcgtcctcatcggtcatgctccagccagatgccgatctgctcgacccgacggcgccggccaacacgcgcatcctcgccttctcgcaggcgccaccgtccgcctcgacctcgcacgacctctcgcacgcccagctaaggaggtacaccaaagccccgacgtcggcctcgaacgcaccggccggtgtggcaggctctaagatggaccccaagctccggaagcgggcgatcccgactcggccggagcgcgtgctcgacgcaccgggcatggtcgacgactactacctcaacctgctcgcttggagcagcgacaacatggtcggcattggtctcggcgagggtgtctacatctggaacgccgagagcggcggtgtcgtccagatgggagagtgcgtgcccttctcatcacccgcgcgtgttccagctcgcccctttgcaaacatggctgacgccctagactctgatatatcgccgcaggcctgacgacgagagcccacaggtgacgagtctgacttgggctggcgatggcgcgtacctcgccgtcggcaatgaccgcggcgaggtcgaggtctgggacgccgagacggggaccaagctgcggacgatggccggtcatgctgtgcgtatcgctttgtcgcttcgccttcttcgcttcgtcatgcactggaggaaccgaattgactttgagtgcttcctcgtgcgctttcaggcgcgcgtaccggtcctttcctggcacgggcacctcctctcgtccggctgcaccgacggctcgatccatcaccacgacgtgcgcgtcgcgcgccacaaaatcggcgagctgctcggccacacggccgaggtctgcggtctcacctggcggtcagatggccagatccttgcgagcggcggcaacgacaacgtcgtcaactgctgggagtgcgtctcaggccgtcaagtgggcatccccaaggcgcaagctgataagtttcttccccatcctcgctcgctcgaccagcgcacgcacggccggtaccgtcagctcgaacgactcggggagtggcgagcctgtcatccggtcgatggcccggtggacaaagcggcaccacacggcagcggtcaaggtgcgagcaaccgttttgccttccccgttcaacgtcggccgtccactgatccaaactcctctcacaggctctggcctggtgcccgtggcagacgagcctgctcgccaccggaggcggcacgggcgaccagaacattcatttctggtcgtcgacgaccggctcgcgcatctcgtcgctgccgacgtcgtcccaggtcacctcgctcatcttctcgccccactcaaaggagatcttctcgacccacggcttcccgagcaacaacatttgcctctggtcgtacccttcgctccagcaaatctgggaggtgcccgctcatgacacgcgcgtccttgcgagtgccctcagccctgacggcagcacggtcggcacggccgcgagcgacgagaacctcaaggtacgaacgaaagcccttgttactgctcgtcgccgcagtctactgacgatgcacacccgcacgcctctgctcgttaacacccttagttctggaagatctgggacgcccggcctgtcggcaagggcaagggcggcggacaggacgaggaacacgaaatgatcggcggcgcgacaagcaagtcgggcaagacgggcggcatcaagatccgctagctgcagccgcccacccgcctatctcttcctctactcgcccgacattccacttcccagcttcctatgcatgacctctcacgaccccgaaccggaagagacggaagctgtccgaaaggtctggcgtcaggcgtcatggaccagctacaggaaagctcggtcggcgaggagatgaagagaagacgaaaaaacgaaggggcaggaagaatgcgtggagggtacaagcacagacaggagggacactgaggtgggtcgtgggagagatctatcggccgacgagcggcttgcggcctgccctcgagcggccctggctctgactctggctttggctctcctgaacgttgctcaggtcaaagctctcgccgtcgtttgcctcttcctggtcgaccgccgtcggtgtatgggctggccgacgcgaggtcgagacgttctccttatcgccggcggcgctgacggtggatcggttggcggccgagagcgacttgcggccggcgtacatgttgttggttgagcgcgtgaccgtccgctccacggtcgaggtgccgtcgacgaactgagaggcaagcgggtcagtcaccgtagggaaggacagaaggacgagctctcagaggtggccacgcacctttgccttgaagaggacgttggcgttggtgaagagaccctccttgagcgagacgacgataaactggctgcccttgaaacggttccggaacagctggccgatgtgctgcgtgtgcgagaggtcaagcgcggcgtcaatctcgtcgaggatgtacatcggcgccggcttgaactgaaggagcgacatgatgagcgaaagcgcgatgagtgacctgcgcagagccagcaaacagagagcgtcagcaggcggtcgtcgatggccaacagcaaagtcatggccgcaccgctggccaccgctaagctcggtgagcgactgcttccagacgctgccgagccgaatcttgacctcgagtccctcggtaatgtccattccgtccggtggctgaagctttgcgaagttgcccggcaggagctcggcaaagatggcaccaaagtcgatgttgaccttctcccacgtcgtccgaagcgcgtcgcgcttgtactggtcgagctccgagatggtgctctcaatcttgcccttgtccttcaagacggtcgccatcattttcttgagcgcgacctccttcttctcgacgctgtgcatcgggcccggcgtcagcgctgcatgaagtccgcacatcaaaatgaaacgcacctgtcgatcatgttcatgaccttcgggttgatcttgcgcttcatgcccttctgctggtcctcgagctcagcgcagcggttgcgcgacgtgcccagatcaaagtcggcaaactcgaacacgctgccagcgacgccgaaagagctgcaggggagggaggaggccaagttagcccaacggcgctcggtccgagtgacaggtcgcaatgagggcgcaccgcttctcgtcgcgaatccacgggaactggtgctcgaggtcaccgaccttcttcgcccaccgcttttgatcagcgacatgctgctggagctcatgctcggccgccttgatcgccagctccgcgtccgagatctcttgccgcttgtgcttgatatcccgctcgaggtcggcgagctcgttgtcgaacgaggctagcgcagcctgctccttctgcaggtcggccgaggcgctggcaaaggaggcctgtgaaagcgagcgattgcgacgcgtcagctccttggctcgagattcagcctgccgggtgtctgagccagagaaggccgcacctcgagcttatctaggctagcctgcatctcggcaagctccgctcgactgcgagcaatggccgcctcggcctcggttcgctcagcggcggccgactcgatgtcgccgtcaacctgctcgagctccatctcggctgtctggaggtctttgtgcgccgccttgacagtcgccgtctgcttggtgagcgccttgcgctggctcgcgatggcagcctgcgcgcaaagtcaagggcataagtcgtccgcttggggccgggccgaagacagagcgtcgcaccttgagctcgttcagcttcgagtccttgttgcgcttgaagtcttccatgtctttctcgagccgcttgatatcgtctttggcctgcttctgcttgtctttggcggcagcaatcgtctccctgccggcggcgacggtggccttgagctcggcgacatcggccacgagctgaagggatgggatcaggtacggccatcagcgattgataaaacgagttagggaaagaacgtactcgtgcggcgttagagccgttgacctgctcctcgagaaggccgacttcatgcgttttgatctcgagttcgcgccgggccgcccggaccttgtcgaccgccgcctgctctttctttagcatgccctcgacctcaccgagcgcacggcgctcctctgcgagctggtgctcgaccgcccgaatggcttggacttggacgagaacgccgccggtctttggggccgctccgccggagagcgtcccgctcgggtcgtagacgtcgccctcgagcgtaaccgacttggtcaggacggctttgtcaaacgtcacccgcttagcggcatcttggtcggcacagataaaagagccgccaaagacgaaggccattgcggcagaaacctcggggtcgtagccgacgagcgagatggccgtctggacccggcctggggcgagcttcttggccgcattgactttctgcgagcgcgaagaggcggatgcgtgatcagccttatgaaactgctctatcgctcgcggcaggacggacctccggatgaatgctcgacgcctggatcttgttgagcggcagaagcgtgacgcgcttcttgaggctcgtcttgttgcccagcagcgccgaagcgaccttctcatcctcgacaatgacgttgaacagcttgccgccagcgcagacctcgagcgcggtcgcagaggaaaagtccttctcggcgagctcaacgaggttggcaacaagccctttgacttttgaccggtcaaagttgacgtgcgggtcgccgtacgaaaagtcggtcgaggccaggcgcgacttcagcccgtcgcgcttctgctcagtcggccgaaaaggagcgtctcgttagtcaatcttgcgtgaggtgggacgagagcgatacgacacgactgacctgaagcagctcgttgatccgctgcgagacgtcagccttccgcctgagcagctccttctcacgctgctcgtccccgcccaacttatccagcaccttctccagctcggccttccttgccctggccgcctcgagctccctcccgagcccttcgccctccttcgccgccttcgccgccttcggcccgagcgccttgagctcgtgctcggcatggtcgatcgcgaccttggcctgctcggccgtggtcgtcgcggacgacagacccgctcgagcctgggcaatctgacccatgtagcctcccgaggcctcggcgccgccctcggcagagttggccgacgcagacgtcaggccggtcaggagcgtctggaggagctcttcgtcggcggcgagcgaggcagtcgagcggtcgatcgaagtcttgagaccgaggaacgactttgatgcttcggcggcgcgggtcgcacgggcgcctcgcgagtcgcggatctgcaggcgggagggatagcacgcgcatgtgcgaacatgggtgacaaggggggacggttcgagcacgatcggaggcgagggcagaatcagccttctgaacccgcacgtaagagagagcctgctgaacgcacctcctcgatagccttctcgagcgcctttgctcgctcgagctcgtcgccgacgacgcggtcgaccatctcgcgcttcgtccggaccttctcgatctccagcccggcgctcttgacggcttcggcgagcttgccgagcttgccgcctttggcgaattcctggaagagccggcgcacaaagagcaacgaagcgtcagcaggcgaaacggtcaaggggttggaaaagcacgagttgccgcactttgtccctccggccgacgactttcgtcatctcctcctccatcgccctcttcttcccctcgagccatccgaccctctcccggccctcctcgaccctcctttgcccaccctcgagcagctcgccgaccttcgccgaccgcgacgacgcctcgacccattcggccgctttgacgagccgcgtcaggcgctcgagctcagtcgtcgtcttctggtaggcgaggaaggcgcgcttctcggcgcggagcgagtcgagcttgggcgtgatctcctctttgaggagctgcaggtgcggttgaaggggggaagaggaagtcagcgtcatgcagtctgcctgtggccagggtaagaaaacgcaccgcctccatctcagctaccttcttgtccttcttgcccatcgtctttgtcgccttctctttccgctcctcgaacatccgcgtcccactcgcctcctcgaccattccgagaatctcctgcggcttcatgttgagcaccttggtgatcttgccctgcatgatgaggaagttgggcgagttgatattgagctgaaccgactggaagagcgactggagggtgacgagcgtcgtcttgtggccgttgagcatgtacttcgtcaggccgccgacggcgatctgggaggcagggtgggacgagggatgtcagctggaaggcgccgcgagcaagctcaacccggcgaaggtcggtcgacagcaacagcccctctagcgtgcgtactcgtctcccgaagacgccaagaaggacgtgcgcagtgtgacagtcggtactaagcctgcgagaggcctagggcttgctggagctagcccccttgccatcccgcagggagctcgcgcccgccttctctcgctcctcctcgcttcaccacaccagcccagcagagacgtaaacgcacctgcctcgtgaccgtgatcgagtcgtggccctcaaagccaacagggctcgtctttctgtccgtgttgtcaaagacgatcgtcaccgaagcctttgtaacgccggcctggccgcgtttgtagatgaggtcgagcaggttggtcgcccggaccgaagtcatgttggtgatgccgaggacaaagcagatggcgtcgaggatgttggacttgcctggcggagggcgggcaaggggtaagggatggatatgaggcagatgtgtgagctcggggttgctgccgtggctgcaggagctaacagccggggctgaaggccaagcggagaggcaggcaggaaggacgaaccggaaccattgaggccggtgatagcctgcgagtgtgcagagaagcaacgggacaggggaaggaggtgaggcggagagggacagagagagggagctcacgcgggcgtcagtctcttagctgagccggcggccggggcgcctaggacgtacgttgaacgactcgtcccatccggtgatggtcgtccggacgggatacgacttgaagccctcgaggatgagctcggcgatccgcatcgtgcgctgggatgggcgttcgttggctgaagcgaccaccagcggccggacgcgtccgacagcagcagcaggagggcaagcgcgtcgagccgaagcggacttgcatctgcgagtttgccgactgcgcctcctcctccggcccggcctcttgccggtctctcgtctcgtcgcgctgcacgcgccaaaccaccaccttctcctcaactcgactctttcacgatggacgaagcactcctctcggccgtctcgggctccatcgctggcatgggcgccatggtcagtcgtcgaccctctccgcttgcccgtccgcgcactcagcccacccccgagatggccgagcggcgtgcatgagggagaccggcccttactcgctgcagggatggctcgaggaggaaacccaggtccctgcgctgctaccgctgctgcttcttttacccagcgctcgacagctagcagcggatggcatgcgagggaggaggatagagcgagaggacacgccaagagcgtgcgcccggctaaacctccccggcggcagtcgagcgggggcatcttcctctcttcctgggacggtcggaccggtcctccggagacgaaggccgactgtcgctcgagcgtatggcgggccgctcgcggatcgtctctttgtcgtaagagaatgcgtctgggatgttcgtggaggagggggccagctcgcccagccggcgaccatctcaaccaccccttgacctcgcctgctcacaagacctgctcactgatacattcaacgatgcaaccccctctcgctgcaggcgatcacttatcctttagtccttgtttcgactcgcaacgctgtccgctcctcggccaagcctcgccctgctgcccccaccgccaccgccgccgctccgactgccgacacgtccgccgaggagtatcctgcggcaggcgacaagtcgtacgcggccgtcgtcaaggaggggtccgatgcagatgccgaggctgaggctgcctcgaagatcactgccggcggaaaggccacagggccaaccgacccgctcagccaggcgcttcacaaggcgctcgtgcggtcctcgttcttcccctgtctccctctagaacatgccactgacgctttacattgcttctccgacattgcttctccgatgtccccagtcgactgccgctcgctcaacgggcacgatcggcaccatcctcgcgaccgaaggtccctctggcctctacgccggcctccagtcgtcgctcgtcggcatcgctacgaccaacctcgtctactacggcgcttactcactcgtttcggacggcgcacgtaaacggtccaagggcggcgagacgctgacggtcggccagtcgatcgtcgcgggcatggttgccggtgcgttcgcgtctcgcacctccccgccgtttctcctgcatccggcacctgacaactcgcttggatgcgccttaggctctgcgacgaccgtcctcaccaaccctctctgggtcgtccaggcccaccagtcgaccttcactcacctccacccggaccggccaccgccgtcaatcaaggagagcgtcggcctcctctaccatcagggtgggctcggcgcattctggcgggggatcaaggcggcgttgatcctggtgacgaacccggtcttgcaggtgcggcttcgctagctctaccttacgttttgtcgatctcctccgaggctgaccttcaggctgacacgacgctcctcagtacgcagccttcgagaagttcaaggcgctcctcctcgccctccgccggcgccagcagcttgcccgcggcccggcagcctctgcagccggcgccgtcgtcagtatttcgtcggccgagctctttgcgctcggtgcgctcgcaaagctctttgcgactggcctgtcgtaccccctcgtcctgctcaagtcgcggctcgtgcgtctctccaagctctctctctcttcgacttctgaagctccccaagctgacgctgtcgtccgccctgccctcagcaatccgcctcccacgcctacccttcaatccccactgccctccgctcaatcgtcgccacggaaggcctagccgggctctacgccggtctccgcgcaaagctccttcagagcgtcctgacggccgccctgctgtttgctggccagcagagggtctacgagctggcaaagggcgcgcttgggcggcgctgagagtcgcgcgtcaagtccatacgggtctttcccgtgcggtcgtcgtctgtcgctcggttgtctgtgctgtctttgtctcccagctcgtcggcttttgtctccgatccttccactttctacttccggcctcgcagcgctcctcctctttctcgcccgttcctcttctggatcccattgctctacccccccatcgcctttacactacgagaagcaaggcacttgcgaatccgcgcccatccatcagacaatccagacgcttgcctgctgcgccgtaaatgccctcgcccggccatcctcctcgacgacccagcagtcctcaagtcggatgccgacacggccctcgaggtagacgcccggctcgtttgagaaggtgtggccggggagaagcggggtcggggaggaggggtggaggtagggcggttcatggccttcgaggccgatgcctctcgagcggaaagggaccgtcagctaaggaagtcgtcaccagggaggcagaaggggagatgacgggagagtagggatatgaatgagcggaagagtggagagagggaagacgtaccatgcccgagccggtgggtgaaggcctcgccatagccagcctcggtcagatacgcccgcgcggcgtggtcgatcgaggcggcgttggcaccagagatggcggcgtcatacgctgccttttgggcggcgtggacgagagaccagatgcggctgtgcggaaagcgcgtggaagagagtcagcatgcgtgcctgtcgtgcaggcctgacggcacggctcatccggggaccgacaggtgctcggcaggtattctgctcccaggtagcgcaaacgtccgcgtaatgtcggccgtatagccctggaagaccccacccgcatcaaccaacaccagctcgtccgacttgagcttcctcgttcctgatgcgccgtgaggaagcgcagcgtctgaaccgaagagcacgagcgcatgagcctttgggccgaggccggctttgacgaaccagctgtcgaggatcgtcgaggcagtgtactcggtcatgccaaagcttaggtcgtctttggtgtttcggatggcccagagcgtaagctaggcgaagaggagggaggcgagacggtcagcgcagccggtgacgacggtcgacgagtggcccttccccgaagacacgcaaaggccgcacctcgttcgcacagacgagccgctcaatctcctcggccgtcttacgctcgcgcaacgtccggatcgccggagggctactgacgaccttcacctcgcgctcgagctcgcgcgagagcgaggcgccgaggtcgcttgcgatgcccgagcggacattctcgtcgacgacgaccgtcagcggtccttcttggaaggatgggatgtaagcggcgagagcggcgtaagggtcttggtcctccagccaggggagccagatcgtccggttcgactctgccgggtcgaggacgagtggcagctggagctccgcccgcgtcttctcaaacgaagggacgacgatgagcgtcgtcgggtccgtcatgttggctcctttgggagcggagagtgtcacgagcaggaaaggccgctccgagagatgccagtctgagctcgaaaggttggcgtagaagagcgtgttggcgctcggctcggcaatgtatgccgcgaagccctcgtcggcgagcgtcgaggcaagccgggcgcggcgggcggcaaaggtggaggacccgagggagtcaagggtcgttgcgcatgatgggagagggggagtcgagcgtgtggagccgcagtgcgagacgagcgacgagataccggcctgtgtgcaggcgggcagggcgagatggttggttcagtcgggctgcgcggcggaagctgagagcaagaggacagagggaagactgacgacgacgaggaagaggccggcgacgagccgtgctctgtgcgaggtcgtccgggctcgcctctggctgctgcctgcgggctcgccagtgagcgggagcatgtgctgcttctccatggtcgagagcagggtgagagtcaggagtcggcggccgcccaacccctttgggcttcctcctcctcccgaccaccgaagaaggtctgcctcgccgccgaccgtcaacaagcctacgacgcaaggagcagaaggttggcagtcctcctgcatgcacaggtcggcccgccagcaaactgacttcgccctaactttcggtgccaggacgatcaactctcgaccttgcctcgcctttgtccgatccccctcggagcccctcatccgcgcgtgccttggccgtctcctccttgagtgcctcgcgctcgatcctccaactgctgccttcgcagcatcagcagcaccagcaacgcgatgggcgactcgaaacctgagctcccgcaacacgtcgcctcggtctcgaggccggcaggagcttcagggacctcggaggctgcagcaccgccgcgcgagacgctcctcctctcgattccccctccggcgccgtacgacctgcacgtccggtcgctcgacatcggcctgccctcgacagtgccaacgtgcgcgagcaagctcgccggtcggctcggcaagtccaagaagcggccggtaactagcgatgagaaggacggcgccgagccggtaaaggattggatcgtccgcgacgtcgacgccgtctgcaagagcggagaggtccttgccctcatcggcggctctggttcgggtgcgtcgagctcctcgctcataggtggcatgccgtcgagacctctgctgaccgcttcctcccgtgcctacaggcaagacgtcgctgctgaacgccatcgcgggtcggctcggcgcgctgcccgtgctcaagggcgaggtcgagtttgttccagccgccgccgcctcgacctcgacagaccctgtcgcggatggcggcaagacctccaaggtcaaggctggcaaaatcgtcggcttcgtccgccagaacgactacttgctgccgtacttgaccgtccgggagacgctcatgtttgcggcgagtctccggctaccccggagcgtcgacaaggcgcagcacgtcgagattgtcgagcagacgatcctcgagctcggcctgagcgacgtcggcgacgtcgtcgttggcggcggcgagggtgcgcgcaagggcatctcgggcggcgagcgacgtcggctcagtatcggctgcacgctcgtcacgctgccttcggtcctcatccttgacgagccgacgtcaggcctcgatgcgttcacctcacatctcctcttgctcctcctctcgcacctcgcctcgcgcggccggaccgtcatcctttcgctccatgcgccccggagcgatgccttcgaaatttttgaccggctctgcgtcttgagcaaaggtgaggtcgcgttcagcggcccgacgcgcgagtccctcgcctggtttggctcgcgcgggctcgagtgcggcgagggcgtcaacccgctcgactttctcgttgacatcacttcgatcgacgtccgtgatccggcgcgcgaggacgagtcaaaggagagggtcgggacgctcgtcgccgcctggaaggcccggtcgctgtccgagaaggagctttccaactcgacgacgtcgtcccgcccgaccgatcccccgggcggcggcctgctaccggacgaagacccggcctacgacgctcgtcggccgggcgttcttgcacagacggcgatcctcctcaagcgctcgcacctcaacgtctatcgcaacgtgccccagctgtttggctttgccgcccaggcaatcgtcatcggcgtcctcatgggtctgaccttcttccagttgggcgagagcccggctgacgtccagtcggtcaaggtgcggccgctgctgcttcgtttgtctgcgattgcctgtcgctgacgttcctctcttggactggcagaacgcgagcttccaggtcggtcgctctggaactgtcctttatacgtctgctctctcgctgactgacatccttcactcgcctctagctcattccggcctacttttacttgacccaggtctactggatctggacctactgcaacgcgctcgtcatctttgaccgcgagcgtgaagaccggctttatggtgcgcctgaccgtctgcctgctctttttccgtcataggaagactgaaattcgcttgtgctgcgtagccgttgcgccctgggtagtctccgagtttctttcggtccttctgccttcgatcatggcgcccttcatctagtgagcgccgctctcgctgtctctccgacataatcggtggctgactgttgctctgtgcagctccgtcatcctttacacgatggccggcctccggcccgatccgtacgcatcgagcctgttcatcgtcgccagtgtttgcatcctcgtccagtgggcggtccagggtgcgtctacaggaacgccatcaggggagcggtcaaaggcttactctgccgtgcgcccctttgtcggcaggcctcgccctgctcgctgcctcgcttgtccggcagtttgccatcgccagtctcgtctgcgtgcgtagagctctcttgcctagccctcgcctcgagtccagctgaaccacggccccatgtcgaccctccagaatgccgccagtctattcatggtgcgcagaggacttccttatgaggcatcgtatacagcactgcttagctgacgcgccccctttgatgcgtagacgatggccgcgggtttcctgctcacaaatgtccccgcctacgtcgcttggttccgttgggtgcgtcgaaagttctcagagagcttgtcaagcgctggattcgccgtgactgacgctacacctcgatgactggcagatctcgttcaacttctacggctaccggtccgtctttatttgcccaagggaggcttcaaggatgagctgacgtaccctcgccctcctgcactgcagcatcatcgccccgaccttgctgaagggtcggaccttcacttgccctggcgtcacgggagccgcgcgagtccaggcgagtgtcgctgccgcatcaccgtacaggctcaaaagctgacctctcctttgactgcagtgcgacggcgatcgcaccctcgccggcctcctcatctcgacggagacctcgatcggcgtctggtacgccggcctgatcggcatgtttgtcatcgagcacgcgctcgctgctctcgccctccatttctaccacccgggcggcgtcaagtttgcgcgggcgacgtcggcccgcaagggcaaggagaacggcatgacggatgcgctcgacatcccgcgccagcagattgacgtcgaggtgcgtttcttgtcgacagcgagaagatgtgacctgccggctgacattcgtgacggcctcacccgcgccagatcgaccacgtctcgctcaagtggaccaagcgcggactctggcccttctcgacgaggacgcagacaaagacgatcctccgcaacgtgacggcatcgttcccggctggcgaggtctctgccattatcgggccctcgggcgcaggtacgtcacgaccgcagcggggactgccgcaccctcgctgaccttgctgctgctgctgcatctcctcgcaggcaagagcacgatcctccagcttctcgcacaccgtcacctcaacgccggctcgatggcgcagttcaagtcggacggcgcgctcctcttcaacggcgagccgtcgaccaaggacgttcagaactcgatcgcctttgtcgagcaggacgacgactaccacctgtcgggcctgactgtccgcgagacgctgcgatatgctgcgatcttgcgactgccagcctcgatgacgcgcaagagcaagctgtgcgtcttccggtcctccgagacgtcatgcagccacgaaatgactttgttgctcgcctccgcacagcgctcgcgcggaagatgtgctgctgatgctgggactcaacgactgcgccaatgtcctcgtcggtggtgccctggtcaagggctcgtcgaccgccctatcgctattactcgacatgcgtcgactgactttacgcgtcccggatccccttccaggcatctcgggcggcgagaagcgccgactctcgctcgcggtccagatgatcagcgacccctcggtgctcgtcgtcgacgagccgacctcaggcctcgactcgttcatcgccgccaacgtgatggagtgcctgacaagcattgcccggaccggccgcactgtcattgcgacgatccaccagccgcggtccgagattgtcaagacgttcgacggcctgaccgttctcgcaaagggcggcgcgctcgtctacagtgggccttacgcgcacgcggtgccctggttcgaagcccagggttaccctctgccgtccaagtcgttcaacccggccgatcacatccttgacgtcgtctcggtcgacccgcgacccggtcgcgaggctgagtcggctgcccgcgtcaccgggctcatctccgcttggagcgagcaggtccagaaggtcgacctcgtcgaagaccgggcctcgcacgacgggccgacgatcgccgccggctcaaagatcacgccgttctacgtcgccttccccgtcgtgctcgaacgcatggtcttgaacctctggcgtcagcgcgaggcctttttcaaccgcctgacgcaggcgcccctgctcggtcttatcttccgtgcgtcttgctgcatcctccgagggcgctcccaaccagctaatccttgcctcttggtctccccttccagtgctgttctaccagcgcatcacaaagggccctgccggcgcgcaggaccgtatcggtgcgtcagtcaggccaaccccctcttgcctggagctgacaagctgcgacactcactctctgcaccaggtgtcacgcttgaaaacgtcaactcgattccgttcgttggcctcctcaacggcatcgccatctttccgctcgacctggcgaccttcaagcacgagtactcgtccggcgctgcctactcggccggcacgttcctgctcgcctactcggtctttgagctctcaatgaccgtcctggctgccctggtgcgtccacctagcccggcgctgtctcatgccgccctcgctgaagccgctgccttcgcccactcagctatacggcctcatcatgaacgtcgctgtcggcctccagacaagcgtccgcatctactttgagttttcgacgacgctcctctgcctgctctcgtttggcgagtcgatcgccgtcctcttctgtacctttgtcggccagatgggtctcgccgtttcgctcgtttcgaccggtgcgcttcggctcgcccttctcttactagcgcctggcggctgaagtgaccgcgcgttctcctattttccttcagtcctcgcctgctgctgccagatctcgggtctcgtctcgctctcgatgcccaaatggctagccgcaattgcctgggcgacgccaatgaagggtacgggccgtcgaatcttgtgccgctcagcgctacttggtgctgacgcccaccgttctgcaacctttaggcgccaccaaggtccagttcatcaacgaggcccgcggcctgcgctttaactgtgacgaagcctcgattgtctctggccgctgcgtcgcgacgacgggcgaccagatgctcgaggccttcggtttcgaggacctcgacacggcgcggttcctcggcatcatggtcgcgacgacggtcgcctggagagtgctcgcctgggcctgcctccgactcaagatgctcaacaagtagtccagcttcctcttcccgtaccgttgtagaacgcaactcgctctttcctctgcaccttgtcgcttgtacgccctctcagcattctgtttttgcaaaccatctcttcaaagtggcgggttccaatacttcaagacgtcttctagctagtgaacggctcatctcgacgcatggccaactccttccgatcagctggccgaacggcacgacccctgacggtgttatgctagccagcgtccaattagctcctcctttgaatcatgagcgagcgcaaacgacggagaggacgcagccgagcggcaaacgacacgacgtaggtggcagcgggttgccgaatctcaaggaaaaggggcggccgggcccgggccaaccttgtgccggtgcgcgccgagccggtcctcatacgagtagatggcgacggtcgtcatcgcaagctcatgggccgtccggaagatgcggatggcaatctcctgcaaagtggaaagggtcgcgtgtcagcagcggctacagcagggctctcgagagcgaccggcggggctctttgccctcggcgcagagagaggggggacgcacgccgcggttggcgaccatgagcttcttgagcgggccgccatggccggccgccttcttccggatgttctggatcctgcattcaggagggggatgaagggcgtcagcagctatcgaagagagcgagcagacaagagacggacgtgtggctgggcgtgcccggcgtcgctgcgggggagaggattgccaatgagcgcgccggtcggtcagttgagcccgcgggcaaagacgtccgagggcgatagagacggacagggcaggctgttgtcgagaccgccacccatgtgcgcggtccaggcttcgatgggcgtgatggcctgcatcttgggtcggagcgagggcgctcgaggaggaagggagaggaaggtgaagggagggaggagtcgagctgttatcgtcgggccgggcacgtcatgagccggaggggggaagcaaggacgaccaagtcagcctgggcacaacagctggagcagcgcgagcagcaggagcgactggcggcgtacgttgtgggctagggccgcagatgtctgacggtcgtcgagcggtccggtcggctggcagggcgcgaggcggcagtggcaggtgatgggcggaggaggtcagccctccggcccggacgcggcgggccatctgctcgcgctggcgctcgcgtgcagccctcccttccctcctatccggtcggaaaggggatctaaaggacgtacgagcaagtgagacgcccttgactggcaagaaaaatgagagaggttgaagggtcggggtgagggtcgagagcttgaggagtcagggccgccctttcaaacagctgctggcccgtcgcgcggttcggccgggcgcgtcgccgcgggcgtcctccgcatcagcacgagcgaggcggcccggcgccgcttgtctccggccggtcagccgagcggacgcccctcaggccctcacgcgtcgtcgacccttcctcgctcgagacccgggacatctttcgagcggcagcggccgggacattccggggagcgcccatcgcatctgcagagccttgcgacagacgagcggcctctctgcgacgccctcaccgctacgccagtccccggagataggccatcaggccatcgagaatatcgcgctgactggcggcaccggcctgctcgccgtcggccgctgctgccccagactcgccgacgttgtcgtgttgttctgcgcaagaaaaagggcgtgcgagcaaatgtcagcggcgatctgaccgagagaagggcggcgaatggacggaccctgcaggacatcgatgatctcctggaacgtctggtccttgcgcgacagcagcagcttggcctggtcccgagcctgcagtagggccggaaggcgcagtcagcagaggagtgccatcgcaggccaacgcagagcaacgtacgccgtcgtcctccatcaccaaccaggcgaggataaagtcgatgttctgcagcgtaaagaggccgccctcgagccggcggaggtagaacatgtcctcgtcgtcggcgtctagcggcgaaccctccttagcgagcgcctgggagagaaaattgcggtcatcagcctcttggcgccagacgccgttgaacacggagggatgacagccgacgcaccgccttctcctcatcgatggcccgctcggtcgccattaggcggccctcagcctcctcgcgcaggtcgagcagcctgtcgaccttggagtagccgtcctcgacaaactttgcgagcagccgaagccgcggcactgattcagacgcgaggttggtgaagagcgaggtgaggatgccgagtatgtgctcggtgtcctcggccgacgacagcgccttttttggccccttgcccatctgaggtgagaggacacaccggtcagcgaacagaagcggtcgggctgaacagcgaggctacggacgaaggcggcaaagagcgttttgagaccgagggcctcgacgaagcgctcgcagttgcccgagccctccggtccgctgagggcgtggtcgaggacctgcgagagacggcaaggggagcggtcagcacactctcgcagttgccacggcgagccaaagcaggacgcaccttgatcgaccgcgagcgcgatagcttcttttctttcatgcaaatgaccatgagctcgacgccctcgctctcgaggaacatctccttgagctcaggctcggcgagggccgagcaaagcgcgtcaaaagcgttttccaaaaactcctcctcctcctggtcttgcgggtccgacttgcggtatttctgaggccggcaaggaggatggcctgtcagctaatgcgtgtgattgcgtgggggaggggcgaaggtctgaccgagagcacccgcagaaggacgtcgataccgctcagctttgccagctggaggcgatttgatcggctctgctggaggaggatggcaaggatctgcaggacggaagcgagatgatcagttcgtgggtcgaccagccgtaagacggtcaacagacgtacctcgctcgcgtactgcttgtttgagtcgtactcttcgacgagcatgcggtcgacaagccacttcatgctcgtcgtcgtcttcacgagcgtctcagccaacgaagggtcgaacgagagtaggttctcgaaaatgcctgcagaggtcagcgccgccgtcagcgactaaggaagtgactaggactacagatcacgcaccgagcgtctggaagactcccgtccggtctgtctcctccttctcgtctagccgtgaaaggttggcgacgaggagctcgaagatgttgagctcaagctgccgaagaggagacgtcaaaggcggtcagcgcctgctccggacaatgcaatgaggtacgatttggcgggacgtaccagcgaacccacgaggacagccatgacgttctcctcctcctcctcgtccttgtcctcgtctgcctcgccaacgtcttcctctgtcagctcgactaggaggccgacgacgtcgagcgcaatgtcggtattctcatgcgcaagcagctccgagaggatgcggatcgtaccggcccggacgagttccgggtagaagaggacgggtttttgtggaagggtagacgtcaggagatggagcgacgagtccaatgacgactccgaatcgatgaacctggttcaggcgcaccaggttgtcagcatgaagaatcgactcgcagtcagtccgaacggcatgcgaggaggacacccacttttcggggtcgtctgggaacttgacacgcatctcctgattcttcttgacgacccgctcaaactggacgagcatcttgcgcagcgcagggaccgtcacttctgacggctcgacatcctcgtcgcccgcagcttcgaacctgagcggcgcgaggaatcagatcagcatcctcgtcggacgcagcgccgacggcaagactcacatatcgaggatggtcttctggtcctcgttcaagccgccgccgaacatgcggccttcgtcgtcctcgtcgacaaagtagtctgcgtcgccgccggctgtgaccgagggttcccttctgatcagcgcgcgactctagagacggacccagggcggccgccagactcacgggcaaagtcgaagcgatcctcgccatcctcgtcctcattgtgatcctcgacggtcgcccgacccctgccgtttggccgcgacggaggggccatctcggcgtcgccgtcgtcgtcgttcggcttgtagcgcttgaggacctctgcaggcaaggcgcggggacagacgtcgggtcagcagcggacgatcgtgaggaatagatatctcgtagcacgcaccggccgagggcaggtcgtcaaacttccgtttcgacgcggaagaggaggatgaaggcagggccggaacctggacgaccgaagctcgacgactcgtcagtgacggagccgtggtgactgcggcagctcgatctctaccgctctgatagccgaacgagcttctgaacggcgtaccttgaacatcttgtcgatatccattgcggctgggtgagtcgggcgagctcaagagcaggaagcgaggtggctgaggcgagaaggaggaggctgttggaggacgagaaggagcgaccagccgtgcttcgcgagcttcccgccgacaccgacctcgagatcacttaccctcccgcctacagctctcatctccttctcgacgtgatggacaccggcagctacgacctccaggcttggcagacctactacgagagccagggctatgacgccgcaacctcggcatcctacgcctactacgcccttcagcaggctcaggcggcggccgtctccgccaccgcctcgacttcggccgcagcttacggcgtgcgtcccctctaccttgtccatccactgctcatcttcgagagcctgcgcggctgactttggactgtcatcattctcccgcctgcaggtcgctgctccgtcgaactacacgccggcgccgagcggcctctttgacggcgacgcgacgggcggagctggcgctcaacccccgcaggaggagggcggtggcaaggtcaaggggaagcggacgaccgtcattcgcaagggcggaggcaaggtgtgggacgagtaagtcgaccggctgctgtcgaaactcgtcgagcggtgttgctcagcttcctgactgctcccttccgccctcctcccgcgcagcccgactctggtcgagtgggacccaaagtggttccggctgttcgtctcggacgtctccaatgactgcacggagaaggtcctgactgaggccttctccaagtatccctcgtttaagaagactaaggttgtcaaggaccggctctcgaacaaggtgcgtctgcccaagcttcggagctgcggtgcgtcccgacgctgaccgtgtccctctttctcgctccagtccaagtacgccttccttgccttctcggacccagaggacttcctgctcgcttggaagcagatggacggcaagtacgtcggcaaccggccgatccggttgtccaaggcgtcgaccaacgtccgtccggtcgagattggcaaccgcaaggccaaaatgtttgaccaggcaccgaagggcggcatcggcctcggagagcgcggccgcatcctctgagcgacgcctgagtgacgtcgagacagctgcggctctgcgggttggggtgagaaggggcggggcggatgaagcggtggtgcgcgtacgatcttcatgactgcattcttgcagcagacggcgatgttgcttttcgcctcgtctcttctgttctgacctaaggtcggccaagggtaaagtgggctgtcggagtcgtgcgatgatgcatcgaccggcttctccacgagctgagcgtcttgctggaccttcggccgctgcggtggcaagctcctgaccgccatcagctccgactctccattacttcctctcctttctttgcactcacctccttcaagcatgggactcagctacaaggccggccggtgcttccgccgagacgagaccaactttgtcgactcctcgcccgagaagggcacgctctcgctcggacaggaagatggacgtgcgtcgggcctcctcccctgctgccatcacgccgttattctctgctctgagctgaactcgagcggctctgccccgcatcgcagtcctccacgtcttctggaaagcccgcccgtcaggcacggctgagctcgacctgatcgtctttgagggcgacgccgtcttcagcaaggtcagccaaagcaccgacgacaacgtctacgccctcacgttcgagagctcgcaggagaagcacttcgtaggcatttaccttttccctcgagtagctcgatgagccttgctgagcgttctcctccgctttcagttctggttccaggcccagggtgccgactacgagacgcaggcctcgtacatcaaccagatgatcgccgacccaagctttgtcccgccgcctgccgcctcgagcagcagcaacgccggaccctcgaccgcagcgtcactgagcgtgccggcttcgggcctgcctccgacgacacccgctcaacagagcacatcgtcgtcgacgccggccgcgcccaacccgacccgcaccgttggctttgacctcggcacagccggcagcagcagcggctactcgccggcccagctcgagcagctgcgggccatgctcgaggctcaagtcggctcggcaggcgagagcgcgtccgacagcggtacgtcgtctttgcttgtcggtctggcagtcgtaatgctgacaacagctgtcattccctgtcttcagacgcccgcctgcaggacatcctgacgccgcagctcctcaccccgctgttctcttcgccggagctgcttcggtcgctcgttccgtcgctaccgagcgacctgcccgtctcgtcgccgccgactgcggccgagatgacggcggtcgtcgagagcgctcaatttcaggagggcgtccgcgggctggaccgggccctgcgaacgggcatgctcggcggcctcgtccagggcctcggcctaccggagagcgccggaacaagcgttgaggcattcttgaaggcgatcggcgagcaggccggcggctcggcagcgacggaggacgagggaggcgcaatggagaccgactgattgcgtggccttgcgatacatcatgacgccgtttgatcgcttctgacggtgagcacggacggggggtcgcaggcaattcaggtcaacatcttgtgcaataggtatcgtcatcgaaaggcttcttcatcccagttcgctcccccgccagcccaggcgttgacatctgcctcgtcaaagagccgcatgaagcacgccgttcccggcgtgttaaaatgtcgataaggttcgagaggcgatagctggcggaagggattgatagtcagcactctgggaagggtggaggcgatagagggcggcggaagggactcaccgacgctccacatctgaagcagaagtgcgcctcgcacctgtcaaaagcagaagcaggtaaggtcttgcacaacagcgagccataagtctcccaacgactcgccttgcgcaggtcatctgcgggaaaagatggcaggaagtcagtcctgctggctgcccgcactctggaaccgcggttgagactcacgtggttgcagccgacgcttttctgcgtcgcgacctggcatcccgggcagttgcgcgtgttctcctcgagccactttcggttttcttcgtcctcacgggccttggcggcaagcttctcaaggttctttttaccgtacctcgcctcgagttgcaagcgcgctggatcgttcgggccgagatcgtagtagtttttgatgaaagccgggatgctgctcagtggacacgcagtatgaggtccgtgccatgtgctcgagcaaaaggcgcagaaggagaagtcgcagctggagaagatcaggtgtagtcgacgagtcagaccggggacgggaggccagcggggagcaaggcacgacgcacgacgggcactggcggaaccggtcccacccattcggaactcgcagaccgtccggatcgctgtcgaccagcagcgctgaaggaggcgcagggacggaagcttgacacgacggttgcgggcagatcagtcgagtgacgtcggcgtcgtttcgccgcttctccttgagccagagccagcgcttcctggcgtctgcgccgagcaggtctagaacgatggcgccgagatcgatttcctcttcgtcggtgctgaccgcgagaatctctgaggcttttgatgtgcgagcctataaagcggagggctcgatcagcgaaggggcttcccaccggcgcgcagcgcacgcagtcgcaccttgacgcagtcgaccgacgggcacgagacgctcaagacgtcgccttccctgatcgcgagcgagaagcagctcttgatgcattcgcgacagactgacggaaggaggtcagcgtctggcggggcacacagcaggcgaggaaggcgggacgcacagacgtgccggcaccgttcgaactcgatgcacttgaggcctttccgattctcgaagctggtcggccgcttgggtcagcaggtcacactaatctgctctcatgcaggatcgacgcaccagatgccgcaagggtaagtcgtctcggagaacgtctggccgagcacgctggcctcgtactttgagagggcgccgccgagcgcagcgacgtcgacgcccggcgctggccggaggacgacctcgtctgtgcctgctgaccggtcaagaaactggccctcccggaccatttcaaggaagagccagagacactctgactggtcgtacgcttgatcgagcagcgctccgagacgttggcggagggatgagatcggacagaacggcgtcgtcgggtcgaggccgacgagtgcgagctgcggtggcgaactggccgggtaggccggcggcagcagcagctcgagcagtacagccggcagatgggcgagcctgagctgaagatcagagaccggccgctcattcccatcctcgctactctggacaagccggatcagcgtcgattgaccgagctcgactggaagccggacgcggacgaccgtcggggctgggctggcggtggcgtcctcgacggcggcggccagtggtaggagttcgacgacatcgggcccgtaaattgcttcaagtgactcgatttcgagcgcttgatcctcggacgccatgcaagcagacgcgtctagtactggggtgtgacggaggggttgacgatggggctggagggctgaccgtcggaggcgagagtgacgatgtcccggtcgagaccgacgagcagggcagcgacgacgtgtacgcctgacgatcactccgctttgactgccaagacaagcagattctttccccaatctgaccacaggactccctcgaggtcgggcgaccgcacgacagcagatggtcgacggctttcgagcgctgcaggtcttctgcagggcgttcggttgacggacgcggcccctctcgatcctcaggtacgagcatcagaagggcgatggctcggggatcgcgcgctcctcgggctcgacgagcgcgacaaccggcttctgggagacccaagcagcggccgggcagtggctacgagctactcgggcgatgatgtcgagttcttctggagaccttaggctttcaaaacaagcttgcatctggcggtcgcgacgagggcagggggcctgatcccctactacgaccgcaatcaagctcgtgcgccgttgaacagcgtccaccgctctataattctttccttgctgtccgtcggcttccttgcctgtcgcagggcggtcgcagccaagggctgagccaggcgaccgccgccgtcgggcgcgacaacggtgcgcttctatccttctgaccctttctcgacagatgtacccgtccctgacgccctttctggtctcagcgcattcaacaaacgattgcaggtctccacgtcgaccatcgcaactggactgctgccgttcctcacgcgccttccgtccagtccggctggccacgtcgcacgaagacgacggtgtactgcctcgattgccgatacatgtcataaggtagcttcggctgcttctctccttgagcagacccacgcagtgtgcgtcctacgtctgtggccgtcgagcttgctgcatgcagatggcctgtcgggccacgtcgttcagtcacgttcgctgcgcgtcccctccggctatcgattgctgccgagagccgccggcaccttcgccttcgcctataaccttcgccctcacacacaacgcccagcacctccttcctcttttcttctccctaccaatcatgcttccacgcgccgtcccatcgctcgctcgtccggcagcccggaccctcctccgcggctcgcttcggccggcgatggccaccgccgcacgcgccggcgccgccgcctcccaccacctctcgcttgtcgcagctccgttgtcgaggcggtcgttcgcactctcgcatgcacgccggcaagaggaggtcgctatgacgcccggatcgctcttcaactttaccgaggaggagctcatgctccgcgagtctggttagtagtcgttctcgagctcgatcgctgtcgctcggtgggctgaatgcgtctgttgcgatggaacccgcttgattcctcctgcctccagtcaagcgctttgctgaggatgtcgtcgggcccaaagttcgcgagatggacgagagcgagattatggacccggccgtcatctcgggcctctttgagcagggcgtacgtcttcggctcggtccgcgaagctgctcgagatccacccgccaggagctgatgcccgccgccttctgcctgcagttgatgggcatcgagaccgaagccgagtacaatggagccgagtgcagctttacgagcgccatcatcgccattgagggtaaggcacgaactcgtttgctgccttgaaagtgcctcctcagctgacgcgccagctgccgttccagagctcgccaaggtcgacccgagcgtgtcggtcatgtgcgacgttcacaacacgctcgtccgtcctgcgcccacgtgcccccaccgctctgctcatcgctgacagttcctctctcggctctgattaggtcaacacggtcttccgccactacgcgtccgatgacgtcaagtcgcgctacctaccgcgcctggccgagtccgaggtgcgtcgcactgcgcgtcgccttccgcgaccgcctgcgactgatggcttcgtctcttacacagctcggcagctttgccctctcggaggagtcgagcggcagcgacgcctttgcgctcaagacgacggccaagaagaatgccgacggcgactgggtcatcaacggtagcaagatgtacggcgtccgggctgcacggctcgcttgtcgccgcgctgaccgtcttttgcgcctcccaggtggatcaccaactctggcgaggcctcgatcttccttatctttgcgactgtcgacccctcgctcggctacaagggcatcacctgcttcgtcgccgacaaggagatgggcgtcgagattgccaagaaggagctcaaggtcagtcactcggtagccgcaaacgcgcttgtgaagattggactgatcgggtccctcactttagctcggcattcggtcttcgtcgacgtgccagctcagcttcgacgacatggtcgtcccggccgccaatgtcgtcggcgaggtcggcaagggctacaaggtgagacccgaagaacatcgttcgccatgccggtctgaagtcgatcctgacaaagccttgttcttgcgctcttccagatcgccattgagattctcaatgagggtcggatcgggattgccgcccagatgatcggcctcgcccagggcgcattcgacaaggccgtcagctactcgtacgaccgcaagcagtttggcaagccggtcggcgagttccagggcatgggcttccagttcgcaggtgcgtcttgaaggaccggccagagtgaagcaaatagaagagaagctgacgtcttctggatttgcagaggctgcgactaaaattgaggcggcccggctcctgacctacaacgcagcccggctgaaggaggagggcaaggtgtgttattcgctgccctcaaccggatccccgaggacgtgctgacgcgtttgtttcatcgccttttgcagccgttcacgaaggaggctgccatggccaagtggtcagtcgtctttctgctgggcttctagtctgttcacttcgctgacccattctctcgtctctgcaggtactcgtccgtcattgctcaggaggtctcgggcgcggcgatcgagtgggccggcggtgtcggcttcacgcgagaagtacgtgcttttagtgattaccagttgaggcactctcacgcagcttgctgactgctgttggtcaatctttgcaggtcggcctcgagaagtactggcgtgactcaaagattggcgccatctacgaggggacatccaacattcagctcgacacgatcgccaagttcatcaagaagcagtacggcacaaagtgaggggcgttcgccactcgctctgcccagtacttccttgtagctcccatcacgaattccggccccgccctttgtaaacccctctttgcatgatgtttccctcgagcagcgagcgatcccagcgtgtgatcccagcgtgccattagatattaggaggggcgagctgtcgaagcgagatggaaagttgtgctcaatcgagctcggtgggtgagtcggcgccgccgccggtgacagcgcaaaagaggaagagaggtgcggacaaagtgagacgcaagcggaagatggacgacaggttgacgatgggcaggttgttggcgtcgagcgtgcgcgagagtgtcacgccccggacgcggcagtagcagaacgccaggtcgtgctgcggtgggcgatgaccggaagagcagcgcggaagtcagcaagctgttaactccatctctcgcagaggtgcaaggaagtcggcgcaccgtgttgtcggccttctcaaggagctcaaaaacgtcggcatcccagtcgcgcgccgtgcgcttgcgctcgaccgctgcggccgcgacctcgagctcgtctgcgctgtcaaccttcccgacggcctgcctgcccccacctgtccgaccgccgtccttatcctcgtccgacgacgacggcccgtccgacgcggcccaatctggcccgtagaacgtcccgttctcggtatcgatgatcggtccgggccctttgcaatgctcgatcgcgacggccccgccgagcgcagacgacgacgctggcatgaacggccaaagcgcgccgtggagcgcccgatggcgctagcagcgcgtgcactcgggcacaacatggccattgacacgcgccgtcagcgtcaagatgccctggcagcgaccgcaccgaccggcggccgtcagagtcgcgagggccgtcggcggcgccttcttctggccggccgcttttgctgctgtccgggggggcggaggtcgactgaggtcggctcggctgccagacgcgccgtcattgcggcaccatgggctgccggtcggtttcggccgccggcgaactgagcccgttcgcgagccgcccatggcgtcgtcctcgtcgctggcgagcaggagggagacggccgatcgtcgacgccgtcaggcgaggccgtctcgggcgtcgtgctccgcgaagccctccgaacaccgtctaccgctgctgccgttgttctcgacgacttgccgctccctcgcgaactcgctggcggcggctccggcgaagacgagtctgacgcgacctcttcgtcgtcggtcgacggcgtcggcggccctcgcagcacctgcagcggcacaatgtcctggatctcggcgcgctcacagtctggcacgaccgactcggccgaggcatagtggacgccgagccgcgtgtggccaggaagggcgagcgtgtcctgtgcgtatgtgggaaggcagattaggggtcgggcacggtcgctgcggaagcgtcgcgcgtgccagaaggaagagacggacgaggaggatgctggcaaggtcgtcgtcatctgcggagagctcctcaggactcgcgtataggacgcgcttgttaatggccatggcaggctttccctaggagggtaagacaggcgcaggcgcaagggaagcctcggtcgagcgcgtgcgcccgcgtgcgtcgtcgcttgtttacgctcgacttgcgtaaaccgaagttacggcccgggcgtaaggcccgacccgcgcccgattccccttcgctcgctcgtcgtcctccgtctgctctcttcacgaccgccgccgcctctccctcctcccttccctttttcgtcctcgccttttccgccatgtcgatgatccgctcggtccgctttcaggccgccctccgccggtcgtacgcttcgaccccccagcactcgcccgacgtcgcccagtacgtcgacaaggcccaaaaaggcgcccagtctgcgctcgccgccgcccagaaggcggccggcccgaccggcgacaaggtcgtccgccacgccacctgtgagtcgcctggtgcctcagtcctgctttggatggccactggaccgagtgtgcgcctgtctggctctcgtgctattggccgctcggacggtcccgcgaaatgccccgagcgacgtcgtgcgagtgatcgctgaccccttcctccgtcgtcctcttcgctccctctctcctcgtccacttcctcccgcgcttgcctactctcctcacgccagccatgaccgagaaggtcgtctacaacgtcaaggtcgtcgccgccctcggccgccaaatctacgtcaaggagaacctcgcgcccccgacgtcgctcgcccaggtgacgaccgcctacgccaacgcctggtccaaggcgaccaacccgagctactggtccaagctctactcgtccggcggatggaagacgtttggcgtctacgtgagtctctccttcctgacggcctgccgacggttcattggcggggtctcgagtcacggccgctcgcgtgcgggcgggcgagtaaggaggacacctggcgatgcgagccggtcgcgccggccagcacgcacctggctggtgagaagcgcaaggagagggtgtcgtgcggcttggaggaggctgtgtctggcttgggccaagggagatgccgccaggtgcgggtctcgagtctgccgcccgccctctttgttgcactctgcgttgcgtggcatgcgcgcatcagcccagcgttcacttgctcctcggaggagccggcgtcgctggaaggcgctgtctcagtcgagagccagcgctcgaacgcaagctcgagaagtgcacggcgccattggcccggtccccctcccgattgcccgagactgacctgcttccctttttcgccctcccgcgcgctctccaggccctccaggcttacggcctcttcaagatcggcgagatggttggccggcggtcgatcgtcggttactcggtcaccgagcccgagtttgacgaggagcactaagcggcgaagattttggcggtgcagagaggctggcgcgaagcggtggtggcgatgggagcgcgcagagatgcagtgaatcaaggatggccccccttctgatctggattactaggcgctcggctgagtgtcaggagaatgagtcggaggactcgaaaggctctgcccttcgttcagcagccgcgtcgtgcccaaaggagacagcgtcatgattctcgttcactcgcatctccgcccgtctcctcgacgctcctgttcgaggcctcgacctcggccaagaaagcgcgaacgcctctcccccaaggccccttgcgcgcccatgtgttgtcgtggtgggcgtccgggatcgaaagccatttccggaggccgccctttgacgtcgagcgtcccgagccctctgcgtctcgaggtatctccaccaaaccgacctcgacatctgcgcaaccggcgtcgtacatctcgcgcaccagctcgggaaggacgagcgagtcgtcctgtccactgacgaacaggaccggcgtcctgcccaacaacgtcccctttgcttggccgagtgcaccccgcgcgtcccagacgtcgtgaacgaacgggctgagaaagtggtagggcagccagcgcgagcggtagagcgagcgctcgatcatgagcggaacgctcgggaaggggttctcgaggatgagggcgtgcggcggcttgagaggcgggagattgtcgtcgaaggcggttgcgctgctgatgccgtcgcctgtatggagctctggtatcgagccgagcaggcagcacgcggcggtcccgccgagcgagtggccatagacgacaatccggcttgtcgggtacgtccgctgcgcatggccgaggacggccgcatagtcgcgcgtcaggccggcctgcgtcggtcggacgatcgtcgagaggtagtaggaacgcgggcagacggcgaggaggagcgtctggccgtcgaaggggaagggcgagagggacgaggagaggaggtgggcgaagaggggcaggcggctgaccggggagcccatgttgcctgcgcgggaagagaagaaactcagcacctgcccgtctggtctagcagttggtgcgacgcaccttgaaagtagacgacgacagtcgaaggctcgctagactgcttcatctcaatcgaagggcacgcgtccgagtggggtcggcggcgaagcgcgacgcctctgagcatgatgcccgggtcgccgccgggcagagcgacatcctcgacttccaggcctcggagttgcgggtcggcggaatcgaccgcagtggttcgcgcaccaggcggccaggcgcccatgtagatgatcgagcgctggagttgtgaggaaggaggagcagttgcgttagggtcaggaagcgtaatgcacgcgtgcaatgatcgctgacctggaagatgatcatcatagcacactgcagagcgcggcgggagctgtttcagtttctgaagggcgcaatatatcaacatgacccggcgcaccttgtaggtccagaggacgaccggcaggccgacgacagtgcccgcgagcagcagccacggcggcgagacgccgatggccgttggttcgctcacagccagcagcggcgccgcctgaggccagccgaggcacgaggccttcctgagctcgatcgccggctcccaggtattccagcggcggacgacggaccggagacgtgctgcgacgggctgggccgacgtcgtcgcggatgaaagcggcagctgcgcctggccgagcaggcagcggcggagggacgacaggcccgacttcatctcgcttgccacatcgcggttgctgagaaaagacgtcgtcaaggtcaggccagagcagagcatctggttttccgtcgtctcttgacggaccttatgagagatagtggaggcggcgagcttaacctcgggccgagtcgtggctggctgcttgctcgctccggaaaacggcgtgtgcgccagctcgtcctccctcccttcccaccgtctcccactcgaccttccttgacctcgacgactcggcacaaggagcttggagacctctctcacccctcctccgccacctgtcctctctctcgctcccgcccgcacgcgcgatggcgaccgcttcgacccggctgctcagcagcgaggcgcccaaggcggccgacatcgcgcgggccgacaccgacctgacttcgctcgaggagggccgtgggccggcgtcatcggccctcgacgagccgctccggatgagctcgctccggagtacgaacggagactcggaccggccaggtgcgtccttcatcagcagctgcgctgggaccagagcttggtttaaagggcagctccggggaggaaaaggcccgggagcacaagcagaggaggagctcgtcagcggcccctctcgacgtggctttgaccttccttgcctcaagttggcctcaaagtcacaagtttcggacctgcgctagcacgcggtcggatcgcgatctactttgccctgtcgctgaccttgccggccctctttctgcagaccacgatggcacgctgtcgccgcgctccgagtctctcgacgtcgtccccgacctaccggacctcgtcgccctgacgccgcagctgatcgacatgctgcggtcggtccacgtcgcctacctcgtcaagcactttgcccacttttgctccaacgtctacttccagccgtcaggcccgctcatgctcaacgcccgggcgcagctcaaggcgtgccagggcgccggcgtcctcccgctccagtcgctctcaaagggcgagaagtggaccgtttcgaccatcgaggacaaggagctccgcaagagcgtgcttcgctcgtgggagcagtactgggccggcaactcgaccccggccgagcttaaaaagatggtgaccaaggacatgcagaagcaggtccgcggcgtcgtccacggccagaccgacctcctccgccagatctgcttccttgaagacgtgcgtttgcgtcttcgaaccgaattgctttctcggcactgatattgagtcgctcaatgcgcgtcttgtctctcagcagtggggcaatcactttcccaactcgtccttcccctcgccggcccacctgatccgcggcttcgagagccagggcgacggcgagcctcagcgcttcccgaccggcagcggcgtcagcagcaactgtccgctcaccctctccgacttcaacccgcgcgagcaggcccaggaggccgtcagcctgccttcgcagttttcagctcacgctcaggccctctttacccacatcgcgccgaatttcacgctccgcgacgtcatggaggaggccgagcaggacgacacgcgcgagctccgcgtccgcgacccgcaggcccagccgatcgtcgtccgcctcctgtccggaacgtccaaatttgttgccgagaaggccttgccgcacgcagttagcctgctcgaggagctcctcacgaagctgaagactgattcggagcggtggaccgagaaggacgcttgggcctgggtcgacagcatggaggctgaggttgaggccgagggccaggtagaggagtggcagcgggcgacgcggcccgggccgggcaacgaggagaagacgcgccaggcccaggtgctctggcggcagagctgggagaagatcgccggcgcgcgcgagcaaggactcatcaaagagcagcaggtgcggagatgcagcgctgtctgcttgcgccctgaccgccggctgacaacgacgcttcttcatctaggccgaggaccacgaggccaggaacgagttcaaggaggcgatcgcgagctggacggccgcgctcgaggctgaccctcggagcgaggcccgcattcgctacaagcgcggaaactgctaccgggcctgcgaccagtgcgtttcttgctggcgtttgttcctcacgctcagcagctgaccctgctgtcctacgtttcacttgcttgcgccaggccgctcgaagcggagaagggtgcgtgcttcgccgttcgtgcccgtctcgcagcgcggttgctgacagtcctgtcgctgccctgtcctcagatttcgtcgccctgatcgagctcaaggacctgaacgcgctgcagtatcaggtacttgcgcggccgacactcaagcgcatgcggcagaggatgagggccggcggcgcggccgcacctgctgcgtcggacccggtcagcccggacccgtcggcccccaagtcggcctcgtcgaaaaaggctaacaagaagaagaagaagggctcggtcgacgcttcgactgcgatcgagatggtcgacatgggcaagtcgccggtggtcggggagaatggcaagccgctcgtcagccaagaggttgcctcgcccgcaccaacttcgcctgagaagcctgcgccctcactgcctgcttcgacaccagggctgaggccgaaggcaccgtcctcgtcaacaccatcgccggccgaggtggctgcgccggccaacgggatggcaacgcctgccgacgagtcggaagacgctgctcctgtggcctcatccgccaaggcttcgcccgtcgacatcacgcccacggaatcgccgccggccccagccgagcaggcgcctccttcgcctcctcgtgcgctggctccgacccctgttgctgccgctgagcctcttcctgccgcgcctcgcggcctgccaaacggcgcgcctgtaattggcgagacattttcgtccgcctcgtccacgatttcgtcctcatcgagctcgatgccgccgctgccttcatcctcaacatctgtcgcggccgacacggccatcaattcgccggcaacgccgcgctcggagaagcgcgacgtgtcgcacgaccgaggggcgtcgccgcgcgctgcttcgcagcacccggccgacccgatatcgatggctccgcagggccgcatgctcgtcgagcgcccgtcttcacagcatcagcatctgccgcaccagcagcagccacccctgcatccgatccatcaccagcaccagcacccgcgccagccgtcgccgtcaccgtcgcagcagcagcactggcgcgagcaggccggcttctacccgcctttcccgcagcaccacagcccgtacccgatgtaccacccgccgccgccgcatcagcacccgaacggctacccaatgttccgccaggaacaggcaccgcctccgccgccgcaagagctctcttttgcgagcttggcgacccccggacccttttaccacaatcagcatttccagggcatgatgcctccgccgcagccgttctaccatatcccggccccgccgccgccaccgccgccgcaggccttccgcgactcgtcgcacttcagcagccctcggctagctccccctcggccgatccagatccagaagccgccggcgccgccgtcccagcaggaggtcaagccggcagtctccccggcaccctccccggcaccctcaccgacaccgctggcggcagcggtctcgaacccgtcgccggcgacgcctctcgctgtcacaagcgcgccggcctgcgcatcgacaccgcctccgcaggtgacggcgatcccagagcctgcggtcgagaaggcggagacggtgccgccgccgccgcccgcgctgacaccgacgttgtctgagagcgcgcctgcagcgcccgagaagcagccgccagtgccgatggagtttgaggagggcatcctcctctttgtctgcgccgactgggcggcgaccggcagctgtccggacgaaaactgctctgacctgcacgagtgagtctcttcggagctgatggctgcagcggtccagtcgctgacgcagtctccctctttctgcaggcgcggcatcgaggtcgactaccgcgacccgcacgatctctacacgtacccgacggaagaggcctcggtgcccagcagctcgctgcaggaccagggggctgccccatccgcccctattgtggcagccgacgaggttgcggacgagtcggcgacgtccccggagtctgcgcttcaaccggccgccgctgctcctgcgaacggctctgtcggggacgattcgcctcccgctccggcagcagagaaggcggtcccggcacttctcgtcacacccgccggcgcctcggaggtcgcgtcgcccgttgagccgacgccgcctgaggccacgctggctccgactcctgcagccgccgccaccaatggcaccagctcggagcctctggctccggacaaggcgtcgacatcgccgcctgcgccgacgacgcctccgccccaggcgcaggttgctccggcagcagcttcgacggccagagcgacgaagaagccggcagcggccgaccgctggtgggagaagggcgccaacgcggcgtcggccgtcgtgaaggaggaagactgggcgacggcgggcaagaagcccagaaagccgctcaagtgagcgcttcttttggcctgcccgtcgtcatacccgagcgacgacgagcagcctcgtcgtcgcgtggcatggtcgtagggttcttgcggtcaacccgctcggctgtcttcagataaccccctcactcgctttgccttatgcaaggtctgcagactccgcacgcatcccctctccccggacactcttctgcagcctccccttcgcacaccctgccgctggccgcgatccggcgcgcattcttcgcctcgtcgtccagaccctgatcttggatgatccgtctcacagaccctgcccgccccgaggcgagcgttggcctaaagggaggcgacgtgatcaaagcagagctgcatcaagatccctcgtccatggcctcgtcagccgccccttcctcctcctcctcgcccgccggccaccaagctgtgacgccgagaccctgctcggcgatcgttgcctgggaagaagagtagagcaagaggtcaagtcaggacgggcacagcgagcgctcaacgggcggcaagcacaaacctcaagcaggtatcccggcagcatctcgtcctcgttctctgcgatcgggacggcgatgccgtcgacgaccttgatgcgatcccgtggtgggcctggctcgtgctcctggaacttggacgcagtgatgcgcagtcggacgaggtcgttgttcaggatcggcagacgagctgaggagagggcaacgatacaaatcagccttcgagagacgcagttgcaggattgtctggggtcagggcgacgcacttcgttcagttcccgggtcggcctcctcatccaacggcacgagccagtggtgcgcgcctgtcggctgttccggctcgtccgggtcgctgcgcgcagaacgggggacgtttgtcagtatgggcggctggcggtgaagcgctaagcgagaggaaacgcactaaaagaactcatccggggggaaggacgaggcaagaatgtagatgtcgtcgaagaagccgagagagactagggaagaatggcgcgtcagcatccggccggcgagggactttctcgcgccgggcaaaggggacagacttcgaatgcgatccgaggtcgatgacaggacccggccaatgatgacctcgccgatgaacggctggaagacgagcaggttgaacttgactggcaggcaggtcgcgcgcaggagggtcagagagtcgtgtcgctgatcggctcgagcctgcctgccgggcctaggccgctctgggagagcactgacccttgtaccaaatcttgccgtcaccccagcgaacctttccatccccgcattcgatgaggtcccagacggaaacgcagaagccgacctgctgaaggaccttgttggcgtacttgcgattcaggtgcagggtgatggcttcgtgcgtctcgaccgagaactggttcggcaggactgggaccgtatcctggcgagaaagcgtagagaagcatgccgagaacaggtcagcaagaggacggaatagatctcaaagcaggcagggacgcaccctgatttgcgtgaggatgaacatggcggctcgagcgcgcggcctctgcggagctcgtcgaagagggccgggctgtctgctgtcgctctttgagcgactgacggcgagggttcgtcacacgttttttgatcggctgctgactttcggtccggtcgagctgctgctgctgtttacgggagaggcagaggagttaaggtcggcaggacagaggcgacccgttgcagctggctcgaagttcgcctcaggccgttaaggggttcggacggggttcaatatggggtttcaagccccgatgcaacccacgatgggaagctgggcaacctcaagcgccggaccaaggcagggacctcgcgtcgaccgctttataagggaattgcaggtccttgacgacggccgtgccagtgccgcttacctgcgcgacctcaaaagaggtctgagggaggaggtgcggcgagagcagccctcctttcctctccacccatcgagcgcgcgcgcgcaggcgtgaccccaccgttccccccttctttgatccccttgagctcgatgcgaccaaggtagagcgtcatgttcgagagcagagacgctcttgacccagctattgacttacctgagccgtgaagcaggtccgtccggctcaacagcgctgcgcgcgctcgcgaggacgcgcctgacttcgagctcgggctgtcgggcgctcgctcctcgccctcgaccaacatccaaccccctgtcgccagcctcccttcaccggcgcactcgctcgcatcagccaacttttactcagctccggccttcctctcctctgccgcgcgcatcgcctgcccgcggcctttgcgcttcgcaccaccatgctgttcggctcgtccgcctcctcgtccacgttgccgcccccaggctcctcctacaccttgtcatccgactcgtcctctcggccacacacgccgtcgactcctcgacgtgccaacgccggcggcttcatccccatgtcatcgaccaaactccttgccctccagcgcgagcagcagcgcaccggcggccagggcgtccggccgctctcagccccgtccgtcgggcctgagctggacgctactcgcgcacacgacgtcctcggcgagctcaatggcggcaacaccatccgtcgagtagggggaccgacgccttcctcgtcgtccggcagcttgcctgagaagggcctcggatcaaactcgtcgtacggcacgccgctcccgctctcctcgtcgtcgcgcgtgcctggcctggcgtcggccgtctcgaccccctcggcgccttcgactctccgaggtcccgttccatcgtcgatgcctcgcatccgcgccccaacgtcgggtgtcgccaccccgtccgcctcggcggccctgagacggccgcgcacgccgcagcctccaccggcgccaatcatctccgtctcgcacccgggccagcaggacgacagccctccgtcgccatcggttgccgagtcgtccagctcgctcttccctcggatcaaagcgaagctgacggacgcttctcggacgcgcaagaagccgctgctcggatctgcccacgtcgtcacgccgcacaagctcggatcctaccgcggcgccgtcgctgacgagggcttcctctcgagcgatgccatccgcgagtttgacagcggcagcgaggacgccgactggagcatggtcaaggaccaggatgatgcgatctgggacgaaggcgccgggacgaccgagaaggagaacgtcaaagtctcgatccggtgcgtttcaccgactgcctgattttccaaatgcaaaagctgaccgacctggtctttgccatctttcgcagcgtccgaccgctcaatccgctatcgacagccgactacagcatctgggaggcctcgcgcaatcagctgaagttggccgacggggccggtcggcgcggcgccaaggaggactggacgttcggtgagtgccggctcctccgtctctggccgctgtcgaagcttgacgcccgctgaccgccctcttgccttgtcttgtagaccacgtcgtcgccggatcggacaacaaggagatctacgaggtggctgcgcaaggccacgttcggtacgtttgcgtgcacttggccgcctgcaccgagctagacactgaatgcgacgcctcgctccagatccgccatggagggctacaactcggtcgtctttgcctacggtcagaccgcgtgagtcagccacgcgtcacctcgtcgtttgacaggctgactgacaaccctttttctgcagctctggcaagaccttcacgctgacagggtccgagagcgagccaggcatcatcccgcgagccatcgacgtgagtggcgcctcttgcggcgacctcggacgacgctcggctgacgaccccgttcttctcgcctccaggacgtcttctcgtacatccggcgcaattcgggcaaggagttccttcttcgggcgagctacctcgagatctacaacgaggtcatcaaggacctgctcgcaccggcgaccaagtcggtcgagatccgtggtgctggcggcaacgagatcacgctgcatccggtgcgcgaagaggtcgtcaccaatccggcacacgtccgcgagatcctcacccgcggcgacgtcaaccgacggacggcggcgaccgactggaacgagcgcagcagtcgcagtcactcaatcttccggtgcgtctcctcttaaagttggtcgtctgaggtcctgctttgctgacgcattggctccctcgatcaggctggtcatcgagagcagagacaaggtggtcggtggcgaggctgcagcctggagtacggacgatggtgctcccggccgaacgccgatagccaagcgcaaggacaaggcgacgcgcacgagtactctggtcagtcttagacctccgacatcctcgatgggtacgcctgctgacctaccgccctcggtcgtctgcagagtctcatcgacctggctggatccgagaaggcgacgtcggacaagctacggtcggccgagggcaagttcatcaacaccagtcttctcgcgctgaagcaggtcgtctcgacaatcgccaaaaacgagctcaagaaggagaggttcgtctgtcggcagacctcatgcaaaccctgaaaaggaacgacctctgatcagaagccctccttttacagctcgcacgtctcttaccgcaactcgaagctcacccggatgctgcagccctcgctctcgggcgactcaaaagtcagcgtcatctgcacgatgaacccgtcggcgcaagcgtacgtctcctatgctctgccttgttggcacgcccttcgactgatcagcctatctacctgaaccagcatctcggagaccaactcgactctcaactttgcgaccggactcaaggccgtcaagctgacggcgacgcgcaaggaggtcgtcgaagacccgcacgcgctcatccagcaatatcaggtcgagattgcgagcctgcgtgcgcagcttgaggagaaggaggttccgaaggacagctcgagacgtctctcgcgccgcgaggagcagaacctcacgcagtaccggtgcgtgcccttcatccgacgatcaagtacgctactgacgatgcttaaacccgtcctccgcttcacgcagtgaccggatccgcgacctctcctcacttatcctgacaagccagcggatcgacgaggaggaggaggctcacgcccggcccgtcagcccgaccaaggtcgactttgacgcctcgctgcccgacgtacgtctgcgtccggtggccgtctggaagccgcagaggaggtctgctgacacgtctttcgatgtcctagctccaacgcgagctgtttgccgcccgtgtcaagattgacgagcaggcggtcgagctggagcgactcgaggaggagctcaagtcgcggccgcccctgccgttgggcgcgcccgagtcggacaaagacaagctgatcgcccagctccagggtcaagtcagcctctacaagatgatcaacgacggctatgaggccaacctcggcgcgccgatgcgcaaggtggccgaggacgtcgagaaggagtggcagcccaaggtcgacgagtggaggcgcaaggaggaggaggctcggctctttgccgtcgagatctcgcgcaagctcgagcgagagatggctgtgagtccatcggttctttgctcattgtgtcgtgttgaatgaaagctgacacccctcgcctcggcaacctcgatcccaggcgcacaagcggcttcaagccctacacgaccggctcatctcgctcgcgcaagagacgcagctgtcggcctcgcagaacggcggctcgtcgccctcacggcatctcccttccggttcgatgtacgacctcgaccgactcgccacgccggccgacgatgacctgatggcgaccagcctcggcgaccgggccctccggggcgaggccagctcgtgggacctcaacgagcagcttcggcgactgagctgataaagggacgggagtagtccctcgacgcttcggccactgtacctctttttacgatatctctcctcgacctctctccttgtattgctatgatgcccgatctgccctcacacaatcaaagctcgcccgctcgacgtcgagatgtaaacctggcccttctctcttcgccagtccggctcataagcagcggtcagctggcggtgtcgaggtcaaggaagcgctgctctcggtcgttcgacgacgattcggtcgggcgctctgccctactttgggcgacgtgcgcggccgtggagtcagcgtggccgtatcgatcgcgcaaaagtttgcctctgtgcgtcggtcgacgtcctggatcgacggccgccggaagcgccctcgccgcggcgaaatgactgtgccagctcttctcaaatgttgctctcgagtgaattatgatgcgcaagacctgttccttctgtattccctctaccttgcaactcttgaggctgccaattgattagcaagaaggctgcggctgccggcgggccagccggccttagctcgctaattgaccaagggagtatttggctcggggggtcgagagggagcaggccggcgtggcttgccgggcgatggtaagcgatcgggctcggccgtcggccgtcgagctgcgccgaacgcgtcgacgcgcacgtctctgttgctccctacgctcgagacacgtcccagtctggcagaccttttgttcccccccatccgctacgtacttccccactctgcacgacgcaaggctggctcctcgcaatcccacattcgtttccccctctcccgacaccgacctaccttcagcccgaccgctgccctccctccgaccctccaccgacgccgcccgccaccgccagcttctcgatcccagccagcgcccttcaacaacacgagccccctcctcaagctaccctttccgccaaccgtcgtcaccgcttgcagccgatgttcgctcccgactcgttcttctcgccagcgagcaccgtcttccgtggcccgatggtcacgcttcggacgcccttccagcgcaagggctcccaggccagcctgattacgccgctctcgtcccggccgtcctcaccgacgtcgagttcttcgtcacccggctcgtacggcgacggcatcgcgagcgaccgactcgctcaacgcaggtctagcaacccgctcgtcctcgcaaagacccacactaagacgaccggcgcctcgatcattgcggccctcgtcctgctagcctggttctgcctcgtcgcagggccggcgcagagcaaccagcccggatcgagctccaccaccgaccacgtccggccaacagagcaagcatccagtgcgtctcccggctgttgcttggcagttgcccgcaggatcggctgaccgcgttgtccgtccctgctcagcccgcgcccggttgtcgtcacacgcctcgcactcgctcgccgactccaagagcgcacccctcacgcattcgcaggagctcgccgccctggcgctcttcctcacttcggaatcgtcacacatgctgcccgaaagcctcgacccgaagctgccgctcgacccggacctcgtgctcgacatggcgctctcgaccgaccctaccgagcgggcggccgacctccagttgatggaggccgaggcctgggagacaccggtcgtcatctttggcaagcgtggcgaccaggccaccaagcaggctctcgagctactccacagcgaagactactttggcagggacggcgccgggcttgccaccgtctacgtcgaccggcgaggtgcgttcacagtggacgccccccatctgcctcagaacatttggctgaccattctgcttgcccttccagccgactcacccgtccttatcgagcttctctcgcgcctgacgcaccggtcctcactacccgttatcctcgtcggcggcgtcccgcttggcggctacaaggaactctccgtccagcacagcgagggccacttatctggcctgatggagcgccagggttgtgtcctcggtcgcgacgccatcaagcgccggatgaaggagcgccagcgcgagctcaccggccgccagcagcagcagaaggaacagaagaaggaccagaagaagaagggccacggcgcccactgatctccttcagaccatctcgcatcttagatctctcattttgtcctattttttcgtctcctactgctccgtaaaacgtccttctcgtccggaccgacgcttcacacatcctcccctagacgtgtatcacaacctgccactgccttccttgcactcttgcgccttcccggtcgccgactgcatccactcgctcgtggaccttgctgagagcgacggcgatggaaatcagaggtcatcgacgatcatcgcgggtcggcccgtccctcgtcgaatgtagcggctcaatgttccagcggccggcctctgacgtcggctgaaggcccagctctgacatctccttccgcacctcggcgagctcgagttgccagccttctgcttccttctcgagccggtcgagcatctcctgggccgagagagggtgggcccaaggcacggcgtcctccatgaagcgagcccaagagaacggcggcttccggcgacgaaccgcctcggtggccgacgtcaaacccgacgctctcagtgcctcctcctccttgcgttcagcctcggccttttcgcgcctcgcggcttctccagcggcgacggccgggtggacctcgccggcgatcgaggcgacgagccgctcgcgctcggccttgcgaatctcgagaatgtcgacgtcggggatcgggccaaaggcgtcataggcgccatacttccgccagtcgtgaatccgaagctcgttcgccgcccactggccgagcgcactgccgaggccgagaacgacggcagaacccagggtgaaggagagcgggttgcgcaccggcttgagcgtcgacacgcgagccttaagctcctctgtcaagcggcgggcgggtcagtcaacgacgcggcgcctgccattacacgtcctagcatcagacgtacgatatagtggcggtccggtggcaaagaagatggcactcgtcaggcccgtgtcgagcactcggtcggtgcgcatgcagttccacgactggtcctcgagtggcccgccgcgcagctctcgctcgaacaggacgccctgatagcgtcgccgggcctcctcagtgacgcccgctttgagcaggacgggtgagacaacgagctcccgaatacctgtagcggaaggcgcaggatgtcagccgaccgcagtcaaggctggcgagctggagggggcgcaccgaaccaggcggttgctgcgatagatgtgttgaccgccgtcgaaaccgcaaacgaccctggagagctgtccttcatgagagctagaagggagccgacgccacttgcagcggcgactgggagagaggtcgtttgattagctggagaagatcgataaggtgcgggtgcccgagggacgaaccagtgaggcagactccgttgcgggcccggacccagccagcctcggtcgaaacgggccagaggaccgagaccgaggaggtgctggccgctaacggctgagcgtgcgtcgccatcgtcatggacaagtctcgaagaggagggaaggtgtggtcgcagggtcgcgtcggcagctccggcgcggaacgacaacggtgtcgagcttggttgagcgtgggaactcgaagctgatgcgtgcgacccgaccgcagcccgattcagcccaccatcgccgctgagggcactcgacggtcattccctccctcccgacaacagcaggcctgcccaggacgtcctctcagttctcaccagtcgctcttcgcgcgttcgccatgtcgctcaagcggagccgctcgccttcctcctctctctcgccgccgccgcagccccctgtcgccgtccctccgcccgtgccgacgccggcatcgctaccggccgagcaagcaccggcagcggctcgccgagctgcaaagaagcccaagaaggaggatgtcaaccctgcggcgctactgacacggagttcgagccggatccgcatcggcgctcacgtctcggccgcaggaggcgtcgaccagtcggcttccaacgctgcgcgcatcggcgcgacggcgtacgccctcttcttaaagagccagcgcaagtggacggcgccgccgctcgagccggcgtcggtcgagctgttcaaggaggcttgcaagagtgcgtgcggcaggcgcttccgccacggcgagtctcgactgaccccgcgcgatcactcgcgacagaattctcgtataacccggccagggacatgatgccgcacggcagctacctggtgaatctcgccaacccagacaaggttaagcggcagaagtcgtacgactgcttcctcgacgacctgcagcggtgcgaggcctttggctgcggactctacaacttccatcccggcagcccaatgaaggaggaccgtgtgaccgcctgcggctacgtcgccgaggccatcaaccgggcccacagagcgacgtcgactgtgacgatcgttctcgaaaacatggccggccaaggcgacgtccttggctcgcgcttcgaagacttgaagcagattatcgacctcgtcgacgacaaggaccgcgtgggcatttgcgttgacacgtgtcacctcttcgccgcctcgcccgacaacgacatccggacgccagagctgatcgacaagacgctctcggctctctttgcgctcgtccctccgcgctacctcaaagccctgcatgtcaacgacagcaaagcggatcttggtgcgaaaaaggaccggcacgagaacctcggcctcggcttcatcggcctcgcctcgttctggaacctcttgcactggcccggacccgacggcgggaatgaggtctgggacggctggaaggacgttctctggatcctcgagacgcccaattccgagaatgctgagatctggcggcgtgagatcgaaatcgttcgtcttgtgcgaggacctgaccacggcgcatgtgtgctgattgaccactccccccgcccgttgcagctgcatcagcttgaggacctcgacgacccgacccaggtgcccgctatcgaggcggcctggaaggtcgagtgcgcgcggctgcacaccgagggcaagcagaagaagcccaaggcgcccaaagtcggcggcaaaggcaagggcaaggtggcgcaggaggacggttctagggatgaggacgccgacgaggacgtcaagccggctgcgaagggcaagggtcgagcggcggcggagaagaaggcgccggccggccggaagaagaagaagaaggctgacctgagcagcgagagcgagctctcgagcgaggaggacgtcaagccgccgccgaaacggcgcgctcctcgtcagggcgccgagaatcgtgggacggcctgaggccagatatatgtttgagcggtcatgccagagcggacgcagagtagggcgaaacagacgagtggaggcggcatgcgtgtggacgtcaagctagggacgaggagtttggagatacaaaatgtgatggagggccagatgagacaaggatcgggatgcgatgaaggaagcatagggccgtacccgggtttgcgggcgggcgattacagcaggcagcagtggcaaagggtgtacagtagaggggcgcacgtaaaggcgcgatgcgagtgaagcaggactttggcggagaggtcagaatgaagggagacggtgccgaaaagcgtccagaatggcgagtcgtcgtcgtccttgtgcaagtgcgaagagtcaggaatgctcagccccggcgcgaggtcgagggcgcggatgagacgcttttgcgccgcttgggcgcgccgatgccgaagacaaactcgtcccggctcggcgccttggctgcgcaggttgccgagtgagcgaggtgacgaaggagggcgtcactgagggggggcggcgcatattcgcggtcagtgttgcagtcgggcaggtagccgacggcaaagactgacttgcgcatgaagccgagcttgcatgtcgggctggatcggagtgcgagatgagcgtcagttgcggtccatttgatgtcttgcgaggcaggacgctgcccaccagctgtatggccgctcgccagtgtggatgcgcttgtgccgattgtagtcgttctgccaatgcgcagtctgtcaataacgcgaggaaagcacgacaactctgggaaaagttctcgtaccttgcggaggaagcgctcggagcagaactcgcagccaaaaggccggccggcgagctcgtcgtaaacgcctttcgcggaagccttgcccggagcccgcttgcggccgccgcccccgccagctgatgacccgacgaggtcggccgagttcgtcgaagaggggacggaggttgtcgaccgccggcgccggtgggaggcccggtggtgagcgtgcgatgccttcttagccgggacgggaatggagtgtaggctctggtgaggggcgcgtgttgttgaaacgcgcgaatcggtgtcgaacgggtcgacctgggactgaggcatcgagcaagtgtgagtaacaagagcggtcaaatgcaagcgatcaagagcccggacgcacccgggggaggtcgtcgtcgtcagcctcgtcgcccgacgactcgaacaccgagcccgcatcgtcgtcgccctcacttggaccgcttggtccagtgctgtcaccacgagcgaggccgagcaggatctcgctcgaccagcgcacgtcggcctcgacccagccggccggtctgggctcggttgacgtaggggacgagtcggccgtcagtggcggggtcgcgaactggaggccgagcgcggacggcgagccgggcgggcaggcaagccagccgtcgcccgacgagtcgtactgggcttggagccggctggcctgcgcctcgatgcggtagctcgtcaggccgaggacggacggcgtcggcatccaagccgaggaggggaagcggccgccggagcgcagcggcagctgctggtggtgaatctcggctccggcgtcgttgtcgctcgaagaaaacgtcggcgagggcaggaggccctgcggcgctctcttgacggagggcagacgagtcaagaattcggcgtggaccggaggtgagatgggcgacagcggccgctcgacgaccgacgaggacggcgagcgcgagtaggggtggaaggaggccgtgaacgagggcgagcggtgggctgctgggcccggacgagcggggagggcggagacaaacaaataatcagagtggcaccggtcagccgtgggccgagcgacgatagatgaagacgagatgcgccggaggtcccaggccagattggcgggacttacaggtcgcgttgaagcggccgctggttgagctggggaattcaggtgaacggtccagcgtcgcccgctggaggtcgatggtcaggccggggctccaagagcttccgccggctccgaacccatggggcgaggcggcgggcggtccatagcctgcgtaggtcgaccagggcgagctgtagggcgtgtaggtcggcaagacgcttaggccgagctggacgcgcggcatcgggctcgcctgcggttgggcgtctataaggtgcggagatagagctggtcagtatccggaagaagggggagcaggggaccagccactggggtcgtcggccggaagcgtagcccgaaggaacgcgcaaggaggacgaggtacgcaccggctcggaccgcgcccgtccggaagctgctgcaggggatcgcaccggcctgagcgacgagctcgtctactggaggaggaaggagagcaagcgtcagccgtgggccctcgcctcgccgacccttgcgagcggacactaaccgccagacgtacgcgcgggcccggccaggagctcggacacgctgggcagccgaggcggtgcagactctgagagcggcggcgaggtcgccattgtcaaggctgtcgacgagaagagtgtccgaggaaagatggccgtttatcggggctggagggggcagtagccgaaggcgtgctgcggggacttggaggggcggccggggcctggttggcgatggtccaccctcgtgtccctcgtcgtccccctcgcccccttgcaatacccttctctgcgttgtcgtcggcccaaccgaacacctctcaccggttcaggtcttgcggttcctactcctctgtctcagcaccttccctctgcactgcacccacccctcgcctgaagaccaaccaccctcattgccgacgtcgtctgacgctcgactctgcgggatcgatcgaggcctcatcccctcacccccttttagacgtcctctgttgtacgaccattgctctgcggtggcacgcccccgcttttcccctcgatctctcctccccttgcgacgagcgtagactccgacgtcgcagggcaaaacgtcctgactctgcgatggacactccgtttttggcacctgggcgcgatgagctggcgaggcagcctgatcttgcgaagacgttcgcgttgagcgacatcgtcatctcgcgctagcgtgggcgagcgtcggacgacctgaccgcgtcagccttccccgcgctcatcgtgccagactggcgcatgatggcctgcggaccccattgtttgtagccggcgcaaagtgtgcgcgcgtgccctcccttcgaccgaacggcgccgacgtgcgaccgctcaggcgagcgttcccatcgcgcgcgttcagcgtagattgcgtgacatcagattaggaaaatcgtaactctgaattacgacccgcgacgacgcgcgcgtcttgaaaacggcccgcccgcgccgccgctctggccttcgaccgtcaaccccctcgcctcccctccgatcccacatctccccatcccatcaacccttgctcttttctccttcctcctctacttctccttctctgaaccatgtccgccaccctcgagactccgtccaagcaggcgtcgtcagccctctcgaccctcgacctctcggccccggcctcgctcgcggccaagctcgacgcgtcgtccgcgtcgtccaacgtcgagcagcagcaccctgccaagatcgccgccgccgccgcaaagccgtcgcgtgcagagctcgaggcgcgcttcgtcggcgacctcgattgcgaagagtgcgacgagccgatccttcaggagacgtgcgttccctctctcatttaccggcgcgcgcctcttcccggggtcgcgtcgacgcgactttcgatgtcgggccgatggcgcgccttcgtcatccaacctcgctgacccatctcctcaacctgcctttctctctgctctctgcagcaagaagcgctttgtgctgttcccgatcaagtacaaggagatctggcaggcttataagaaggccgaggcgtcgttttggacggccgaggagatggacctgtcgaaggacatggccggtcagtctgacctcgtgacacgacccttccaaacttcgtcccgagactgacctgcttcttgccggctttgcagactgggagaagctcactgacaacgaggttcgtgctcgacgacttcagcacgcatcgcacgtgacctcgcccgactgacgttcaccctccctcctccctccagcggcacttcatctcgcacgtccttgccttcttcgccgcgtcggacggcatcgtcaacgagaacctgcttgaggtgcgccttttcgacctcagccgctcgtccgactcgctcatcctgacggcgcttcctccttcctctgcagcgcttctcgtccgaggtccagtcggccgaggctcggtgcttctacggcttccagatcatgatggagaacatacactcggagacgtactcgctcctgatcgacacctacatccgcgagaccgaggagcgcgagttcctcttcgacgcgatcgagacgagtgcgtccggaggaatctgttggccttccgctcctttcttcatctgacgcccgctcgctcccctctgcagtcccctgcatcgccaagaaggctgactgggcgatgaagtggatctcgagcgagacgtcgtcgtttgccgagcggctcgtcgctttcgccgcggtcgagggcatcttcttcagcgggtcgttcgcctcgatcttctggctcaagaagcgcgggctcatgccgggcctgaccttctcgaatgagctcatctcgcgcgacgagggtctccacaccgattttgcctgcttgctgtttgcccacctcaaccgccggacgcacccgaccatcatcgagtcgatcatccgcgaggcggtcgagattgagaaggagttcctctcggaggccctcccggtctcgctcatcgggatgaacgtcaagatgatgtgccagtacatcgagtttgtcgccgaccggctgctcgtcgcattcggcaacgacaaggtgcgctcggtgcgagtgtgacttgtatagcaggaacgacggctgacacctccctccgctcctctatccctgcctcccttcttccctccccttcttccctctcctcctctcctctctctctcctgctggtcctcaccaccctcctgctgcccgccccgacttaataaacaggtgcgccagcggcggctgcgcctacttctccccttcgtctgatcagagcactgaccacccctccacctctcgccccgcacccagatctacaacgcaaccaacccctttgatttcatggaactaatctcgctccagggaaagtccaactttttcgagaagcgcgtctccgactactcgaagtcgggcgtcaaccagtcgaccggcgacggcaaggttcacgacgcaaaggccgcaaagacgttctcgatcgaggaggattgtgcgtcccttcttcccttctccctctgctcgccgcgggacaacaggctgatcttgtgcttccctccgttatcagtctgaggctccgtcccctcccctctccggcccccgcttcctgcttcctgcttgcccttcttcctttgacgacccctcccttgcctactcctacacctctgttgccttcctctcaacgaacccttctcttctctctctctcgcgtaacgatctcctctcacacctctgtcgccccctttgcgcggcccttatatcaatgctctctcgaccctggttctccaccctcggcgcgcgcgaaagaaaggggacgacacgcgctgtggtgggttgcaggccgagaggaaggcatgagatcgagagacgaccgacggaaaagggacgacaggcgacaggcggcggggcgacgaggcgccttgcagcgaccaactgaccgacggatagttctacgctctgtcgcattgcctcttcttctctcagtttgatacagggtttgtcggagaagttagaggagggcatgtgattgaatgagaccgagggcggccgaaggcagaagtgacgaggaggagcgggagcgaaggcttgtccagccggcaaagacgagtgatcctgtacaggggagcacaaaggcgcgttgcgtcagtgaaagcaggcgaatacgttggagaaacggctgagagtcacgcacaggggtcacggccgtgcaagaggttcagtcgccagcaactagaggggtcggctttgcccggggcttgatgactcaactgttcttctcctccaatgcgacctggtactcgaagaagatgagatcggccaggtctcctgtccgaggccgcctctcagcacccctccggggcttgatgtctcgaccattcttgtcctccagcgagacctggtacttaagaagaaggtaatcggcgatggctcttcttcgaggccggctctcaccctggtcctcaagcgagatgacatgcggccgattagggccggacaggaagtcccaaacgagcccgtcagcaaacaacgtcttccacacaggcgagagcctcgagtcactaccgccgagcagcacgacccggtacgggttggacgagacgcgagtggccggcggcgcgtggagtagctttgttgaagtgatgccttggacgacatgaaagtaatcgactgcgagctcgatcaaggacgggcacagcgccgaggggtcgaacttccggtagatgtcgcattaagggacaaaatgcagcgtcttgagctggccgccgagggcccgaagagtgtcgaggacggtcgaagtgtcgtcggtactccagtatctgttaccgtgactgatacgaaggtcgattaggcgcggcaggtgggcaggcgagaagagcgctttcacgagagagttgggctgagaatcagagaagctcagattgagccgtgtgatgaccgacgtgtcgaaccactcggcgagcggaagatcagagggatagtcgtcgcggccgtaggcaaagagcagttcgacccgcagctctcgcagctgcaagctgtagtggttgggacgagatcctttcaacgccagaccacacggggaagcccgatagtccttggagactggacagctgttgaagctcaagccataccgcaggtacgatgcttgctggttggaattggaaccagggcgacgaccacccgtcgcagtgcaggccgcgcacaaggacggccaagctgggagccgaccggatggtccgcaggaatgcgtacgggccaggccatagctattggtacgtctcgtgtggaggaccgtctcgctctgggccctcgagctcgacctcgttgagaacgacgtgtcgatagaagagaggagttgcgagagcctgcgacggaaacccctttgatcagctggcgccttgtggatttggcaacggaagccgcctcgcgtgtcaaatgtacgtgccagagcttgcagacgaacaccaggaccctgaggacgtcgcggttggccgtcatcgcttcgagctcatcctaatagacggggccgacgaccggctcgagggcggcctcgatgacggccagctgagcctcgttgggcagctgcgaaacggagagagggtagctgtcgagcgtcgacaaagcgagcggcagctcctgatgcagctcgagggactgaggcgagacgcacggcatgcttgagtcgatggcagaggcggagcgagcggccagcaggagaggaggtcccagtggaggccgaaaggcacggcgggcgatggcggacagagctgagcgagtatccggctggacgaggtcgggagcgccgatagtatctgtctgagctttggaaccgagctggcttaaggcgagcagaggggatgtggttggtggtcaagaggcagcgacggccgacagacggatcaaagggagcgaccgagacgcgcgcagcaacccctcgacctgcctgtccatcaaatacggaaagccctttgcgacgtcttcatcgtccccagccgccgccctcaataagacactctgagtagccagccattacttcgcgtgcgtgcgatttcattcgtcctctacgtccgacctcaaccgagaccgacgacgcggccctggcccttgatctccttcggcaagacaaggacgccctctgcgctctcgcgcccaacatcgagcgcacccgccttgcgcttctcgatgacgagcagccggccctcgtatggcctgagcgagtcgtcggcggtaccgatggtaaaatgcgcgtgctcaaggtcgggcacgtcggccagggcgccgggcgtgtcggccggtggcgctgcggcagctatcgaaggccggagagacgagacgacgagcgacatgaccttttcggaaaagacgaggtgggagatcgtaaagtcgaagagcggcggctggccgtcggcggtggctgggttggcgagcgcgacgcactggtcccaagtctgcttccaaggactggcggttggaggctcgtcgcccgccttttcggcgagcgacagccgttcaacccgctcgagctcgacttcagtctcgtggacgagcgtgatgtgcggccggccggtgaggcgccgattctcgagcagcctcgcgaggaacgcctcggcctcgagcttgacgtcgtcacttgcggtcgactggcggatggcctcgcgtgtaagcgacggcaggtcgacttcgggcgcgatggcatagtagcgcgtgacgtcggccttcgcggcctccatcagcgtcttgcggacgtctgggtcatagctgccgacctgggtgaggacctcgccgatgcgctcctcggtcggcagcttgagcgccggcatgagttctttgagccggccgaggaccgtccggaggttgtcctcgagcgaccgctcgacccggagctcgatgacctcgtcgcactcgtcctgcgcaagcggctcggccgtcacaaagaaccgccagaggatgtcttcgtgccgccggacgttgcccgtttgcgcccggagcgtctggtgccgctcgccccgggccgagatgcgagccgagcagagccggtggagcgtgtgttgcggcaggggctggagcgggggcgagagcgcaaagttgagggcgaccagccgcggcggaaggccggtcgacgaggccgctgctatcgccgtcttttcgagctcgtcccggtgctgggcgaggtggttgttgctgtggcggcgcgcggacgaaggggcgagtcagtccaagcgcagacgggcaggacgccaccgatcgcgtccggacgcaccggtctgcatagacgacgtcatgctttgcgagcgccttgctgacattgcggttgaactcaagggccgtcttcttagtcttgacgtcgtcgctctgctcgtggccccagccaaagaaggcctgaagcgcgagaccgatcgccgtcttgcctgcagaagcgtgatggggcggaaaagatcagcgttcggcgcagggaatgcgagactaagacgagaggggaccgaccgcaaccggggatggcgaccgggatgagaagcgtcttgccccagtgcccttcggccgcagcgcctgcgcccgccgccgccgtcttctcccctctcctccagcgcggcttccctctctcctcctccagcatcacccttccctcgtccgtctcgagccactgcaagaactcctcccggacgtgtatgatgcctttgccctgtacaaactggccgtaccactctggatgggtgaccatcgtccgtcggacgaagaagacgtaaggcgtgcattctgggtagcgaatttgtgacggcgggaccttgacgggctcgcgcgaggcgggcggcggcggcggggcagacgacgacgaagcgaccgactgctcgggctcgggcgcggtggatacaggtgaagtggctcctggcagagcgccgctcgccttgtccttctttgactttgccttgccgctctcgaccggctcgccccgggcctttcgggccttgagctcgtccctctctcgcttcttgcgcgtctgctcggccttcatctcggccgtcatcacaaaggcctttttcgcgccgcccggcccgccggaagaagcctcaccgccggtccagggcgtgccggcccaggcgcgcgagggctcgttgacgatcgggaggagcgacttggtgatctcgcggagggaccggtagaggagatagggctgggcaaacttgatcttgaagaagaagggcgagccggccgggtagggcggccgagcggcggcggtgctgtcggtggttgatgaagccggcgggtcgggtgcgactgtgcagcggacaacaaagccttcgacccgctcgccgtcccactcgcccttttcctcgacggcgcgcacgtacgccttgacctcgtcaaccgtcgcgagctcgacaaagcgcgtcccgataaagccccattcactggcaaacgaggcgaccgcagtcggcgcgagcgagtcgaatgctggcgtcaggggcgagaggccgtggaggtgaaggccggtcaggtgcggtgggtagggcaggacgtgctcctcaaacgtatcgtcgcagagctgccaggaggcaagcagagtcagtcagtcgccgttgcgtctatttcgcgggctgcgctgcggcaagggggagaaaaaggggattgggagaaggaaaatgaggctgatgggaatgagggcgcacctctgcgacggccgatacttgcctcttccagagctcggccgcaagatcctcctccgtccggccaacccggtcgaggtgcttcttgacccactcgcgcccgacccgcgcatgaccgcctcggtagccggcttcgtcgtcgcgctcggaagcgacgtctagcgcgtgtttcgaggtgacgagcagcgtctggctgtcgagggccgagataaggatgagacagccgttggacttcagcgtaagcgagtaaggcccggaggtcgagctctcgatggcagaccactgcaaaaaggggtgaagggaggaggtcaacaactccggtcctcgaatggcacgagcgtcgcgcaggtctggactgacagaggtgtaggcaacctcgtcgacgttgaagaacttgtcgtaaccgcgaccgacgacgcggtgctcgccctccttgtcctcaatcgtaaaaagcccgcgggcgagcgtcgggaggagggcggcgtgcgagcggtagaggtgctcggcgaccttccaggagctgacgacctggccggtcgccgtcgggaagcgcgtcgaccggatggcacgctcgggcagggatgggttgggctcgaagagggcggcgacaagggccgtcgcagaagacgacgacgtagagccggtcatctgtcctgcagtagctgtcggggtagtcgagctgaaggggggatgctggtggtccaacgagaaggaggaggtgctggtcgtctctctgccgacgtcgaccacctcgaccacctcctctggactcttgcagcctctacgagcgataatgtggcccaaccgacaccagccaccgccacagatgcggcccgatttctcgcagccgccgccaggctaccacgccggcatgccaccgccaggctaccacgccggcatgccaccgccgaccttccggccgtcatcgctggcctctggcggcataggcggcggcggcggcggcggcccctccctcccgccgcgtatgccgctccctcaagctccaatgaacggcggcggcgaccgtggctggggttcagggcctcggggcgggccaggtatcggcgctggcggcagcggtggtggaccgtcgtcgagcagcccagctggcggcggcggaggaggaggaggcatccctcaaggcggccagacgacgctcttcatcggcggcatcagccccggcatcagcgacgagattctcgagcagctgctcaacgtctgtccctgtccgctcgcactggtcgcccggccagtttgtgtctgtgctgatctcctgtcggcttgtcgtctttctaccaggcctgtggtcagctgcgaagcctcaagcgcgtccggggcgcgaccggcaagccccagcctttcggcttcgcagagtgcgctccgttcctgttcgccttcagacgccaatttgtcaagctgactccttccttgcttgcaggtttgaagaccccgacgccgtccttcgcgcgctcgtcgtcctgaacgggatcgagctcccaaacgttgaggctcggtctcagccgggcaagaagctcatcgtttgtcctctccctcgtccttccatccgcgcgcaattgcacagagaagctgacaaggtgcgctcgtggtcgccacaggttaaggcggacgagaagacgcggaccttcctcgacgagtacgagaagctcatgctccggaccgaggtgcgtgttcttcaccggcgactgcctcagtctcatcctgcgcccacttcgcgcgtgcattcgctgaccggcggctctgtcttgctctttcaggctgatgacgagctcgaggcctcctcggtccgctccattactcacatcctttcgtcattgacctcagcgactccgcttccccactcatcgacgaccgccctctcgtcagtcgcacctgaagcctctgccgccgtcgctgcttccgctgccagcgcttcatccggcggcccaccaccggcgacgaaagacggccggcaaggcgtcacgaatgacacgccgcaccacctgcgtgacctcgctgccgaagacctgcccgaggacaagcgcgacggcgtcctctcgcagattggcatgtttcggggctcgcaagtcgagcgcgagcgggtccggaggaggcaggacgaggagcgcgagaagcagcggatcgaggcgatcgtccgtgaggaggcgcgcgcccgtgagctccgggcccagcaggcggcggcgattggagggaggaacggcgaacatcagcagcagacgctcaacccttatgcggcaaggaatggcggcggcgtgcatgacccccagagctacaatcagcccgtggcgttcgtccctgccggcagcggcggttcggcccccagccgctggggtcacaacggctcgacaggtgccgccgggccggcatcgacggccgcgccagaacggacggacgaagaggaggagcagttgcgaaaggaccggcgacagagagcccagctcgagacgaagcgcgaggtacgtccggccgatcgagctcttgcgttacgcaagagggagagggagagggaggagggagaggggcgcgagctgacccgagagtcgagggactgccgtcggcggccggcttctaagggcgcagggggaggatgaagggagggtagtagagactaaaagggaaaggaaagatcgaggacccggtgtgaagaagaagaggcgttggacgcattttgccttgatcctacgccccaaaggcgtggcgacggagaacttccttcgctccccatctccgtttcgccttgccaaactcgtcgctaacgtctatcttcctctcccgcgccagcgcgaacgccggctcgagcaccgcgagcgccagcgcttccaggcgctcgagcgcgacgtaaacctcgagcacagccggctcgccgacgagcagcgggctgcggccggtgcgctcgagcgcgaggaccgctgggacagcgacgacgatgaggcggcgacggcgcgcgatctgtgggtcgctgaccggtacgtctctctctctctctctctctctcttcttcccttgcctccaaaatcagttcgcaggggctgaaccgccctcttttctctcgccttgccagcccacgctggcgcagtcaacgtcagctcgtccggcgccgcgaagaagaggccgaccgggccgacgccctcgctgaacaggccgagctcgaacaagaggcgcgcgaggccgaggaggcgcgtgaaaggcgcgagaaggagctcatcgagcttgcgatcaagcgcaagcaggcgggcatcttgacagacgaggtggcgcccgtgaggctgtcaattgggacggcagcgggggcggggccggcgggcgctgctgcttctgctgctgctgctgctgctggcggtgcgatcggctcggcaggctcaagcgggccaggtactggaacggcggccaagggcaatgccgccgccgccggtgcgtttggcgccgacgaggacgacgagctcgaggcctcacgccggaagcgggtgctcgtcaagctcgacccgctcgagggcctctcgggcgccgaacgactcagcaagcagaagcggatgctcgacaccgttcgggcaaagatcccggcggagggcgacgaggcaggcgtctttgcaaaggagatcccttgggcggctctgaccgaggtgcgtcccctcttctcctacgggcccccatcccgccagaggctgatcctgacccccttctatatcctgccttcctttctcccgcctcgattgcacaggacatcctgacggcccgactccgtccggccgcccgcaaagggctcgagcggctgctcggcccgctcgaggacgaagacctgctcgatttcgcgctcgaccatgtccgcgagcggaaggctggcttggcgctcgtcgaaggtctcgagccggtcagtcctctctggttccttgtcgtcgaccgctcgcgtacggagacgattgctgactgaaacgaccggcttctcgctctcccaggtgctcgaggacgacgcaaagacgttcgtcggcgccttctaccggaccgtgctctttgaggcgatcgcggcggacgaagggctcgggactgaggggcttgagctctagggcggcagcgatgtcatgagcaatagtgtgcgacggtcccatcatctccttcaggcaggataggcgtcgggccggcaacggcgggctgctgcgcggcgctgggcggccgtcgcccgcctttttctctgggggcgcggccggccgggcgaagcagcgctacctcgtcctccccccccctgtacccaccacccttccctaaagctagcaacgatggtcctcccttcgctcgcccgtctcgccccgcgcgccctccgctcgtccctcgtcgcctcgccggcggccaagctcgcgagcccgagctcggtcggcgcctttgctcaggcttcgaagcgctgggcgtcggcgacctcggctggccacgaggtgcgtctgtcttgcttgctcatcgagaccaagcgctcgaagctggtcgttcgctcggctaggttgtggagatggatcgttgagactgacaccctgccatgcctttcttccatcctctttcgctgctcgttcacctcgcgatccacctccttccgatggccgcgcgatcttgccttccacctctcccaccctcccttgcagatgaccgtccgtgatgcgctcaacatcgcgatggaggaggagatgctcaaggacgagaacgtcttcgtcattggcgaggaggttgcccgctacaacggtgcttacaaggtgcgtgcgaagcttgccatccctccttctggccttcccacacgccttttctcctctgctggcctagattggcctcgttggatgctccgctcgcttacttgggagcagcggccggcccgccacccgacttggacggcatgagcgagccagagccaggctggcaaggcttgctctcactcgagacgcgtccgccgtggccgccgccgccgccgcacgcagctctggcccgcaaaagaagtcgctcgcgaccggacaatcttgtccctcgacccttccgacctctctgctcgccctgctcttcttgcgccttactgacgcttgtgcctttccccacccaccccgttgttctcgctttgctcgtttgcctgccctccgtcccatcgccgccccctgcccttctcgccacgcccgcctcctcccttctctccgcaggtcaccaagggcctgatggacaagttcggcgagggccgcgtcatcgacacgcccatcaccgagtctggctttgccggtctcgccgtcggcgccggtctcgccggcctccggcccgtctgcgagttcatgacgttcaactttgcgatgcaggccatcgaccagatcatcaactctggcggcaagacgtactacatgtcgggcggcaacgtcccctgcccggtgacgttccgcgggccgaacggcgcggcgatgggcgtcgccgcccagcactcgcagtgctttgccgcatggtacggcagcgtcccgggcctcaaggtcgtctcgccttactcggccgaggacgccaagggcctcctcaaggcctgcatccgcgacccgaacccgtgcgtcgtgctcgagaacgagctcatgtatggcgtctcgttccccatgtcggaggaggccatgaaggacgattgtcagtttgccctccgtcttctctctcggcgcgcccgtcaactgacgcacctcctgcaccgtagtcgtcctcccgatcggcaaggccaagattgagcgcgaaggcaccgacgtcacgatcgttggacactcgaagtctgtcggccacgcgatcgaggcggccgacacgcttgccaaggagggcatcaacgtcgaggtcatcaacctccggtcgatccggccgctcgacattgagaccatcatcaaggtccgtcctctcttgctcacccgtcaatcgtcccgaattctgacgactccatcccttcgtcctcgcagtcggtgaagaagaccggccggctcgtgacggtcgagggcggcttccccgccttcggcgtcggctccgagatcatcgcccagctcgtcgagtccgaggcatgggactacctcgacgccgcgcccgagcgcattaccggcgccgacgttcctacaccctatgccgctaacttggagacgctttcgtttcctgacactccggtcattgagaaggttctccgtcgcaacgtctacggcgcgtaaggcaaaacgcgttcaacgcctcttcttctccacaccgggtcctcgatctttcctttccttctagtctctactaccctcccttcatcctccccctgcgcccttagaagccggccgccgacggcagtccctcgactctcgggtcagctcgcgcccctctccctcctccctcttcctctccctcttccgtaacgcaagagctcgatgtcgcctttgctgcctttactctctgtgtctctgtcgtcagcgagggtgaagggtcagaagggggtggccttctgcaaaacccctgtacccgacgcgctgcctctcgtccgcctgtctcccgtcgtctcgcctgtcctcgtcacaggccctcgtcgcacgagtctcgtgctgcgagaggcgtcaacactgaacggtaggcccagcgtgtgctagagcaggtctgcctccgagccgagtgcacgtgtgcagagagcgcgcgagcacgcgagagagagagggagagtcatcgatttcctggcgaagagggacgccgacggttttgtcgtgccgtacgcaatcggtgagggcagtacgggcgagatccggcgaggcaggcgatgagcaaaatagttcgggcgaggtcgtagggagaagggcaggcgtcagctgagctgtcatccctcccgacgtccgcgctcgtctggcgacgggctgcttgggccttcaagaagctgccagacgagggccgggcatctacctcgagtgaaaagagagcgactcgcaccttgcagctcgaggctcaaaaggccaacggatcctttggcttgctcgcagcagcgggagcagcgggagtggcctcccagccctggttggcgcccttcccgcgcttcatctcggcctccatctgcgcccagtcgacgagcctgacctcgacgagctccttgacgccaaggatcatgccagccgtgtttggtgagaacggatggaagacggtccggtccttgcgggtgaggccgagcgttctcagcgtccggccagtcttctcgggcaggctcaggcccgaccgccggagagtgatacggtagtgcgtcgggctctcggcatgcggcgtcgcacgccggatcgaacctttcatctgctggacagccgggtgcgggtactggccccggagcggatgatagaaggggtagtgagccttcggcggggctttgcgtgggccgagcggcggcggctttgggtgctgggggtgcctgagacccatgccgaggagcgagctcgagggacgcatggccgagagagaactgaaagctgactcggggaaaggtgcttgtggtcgagggcgagctgtagcgatcgacgaggaacaagggcggaagggtctggcgggtggtcggtagaggagagctggcgaggcggcggcggcgagggaggacgagaccgcagcgcgcacgagcaggccacgagtctttcgcctctcgacagcgccactctcaggaatgccaggaaaatgcgcagaggccatagagatcaggcggcctcgctgctactgctgctgctgctttacatggtcgagtcaacgtggtcaagggcgagttggccccggcctgatcgacggtcgctccctctgcctccgccgccgacaccgtcgccgtcgtcctcaatcacgcccgccgcctctgcactattcctctgccgtgctgcgatcttcccgggcacaggctcggaagcggcgtcgggatcgagtcgagcgataggaaccgtaacgatgtttggcctccagctcagcctcgagagctttgccgagccgtttagcacggggatgaggaggtggatgggatggcctctggaagagacgcacgctcaaagtcagcatctgcagtcgctgcgctggtggaggcggaggacgaaccgactggcgagctgctcgacgacgtagctaaagtcgccgtctcctgagctgagggcgtgcgtaacggaagtgagcctgtcagcgacgagaggagagatgaggagagaaagggcacgacgtacgcaagaatgagcgtgcagcccgggttgtcgtacgcaaagcgaagcatgtcgctgcaaggtgcgggcagggcgggtcagcgagtgcagcaaggttgcgcttgcgacggccatcggcgcacctggtcagaaggtagtcggcgtcgctggatgaggcgcatcagaaatcaggcgatcgtcagtgacgagcgcttggtatgaagacgcaaggagaaacgggccgcacttgccgtctccgctgacaactttctgaaagtcgcggatctggacgtcgtgctttgccagagcggccaccatgaggtctctgttcttgcgccagccaaaagaagcgcctcgcatgtagctgacgtctacgttggcgatggcaggagggcgcagtcagtagccgtctctgagagagctgtcgcaggtgggtgaaccttcgtaggcctggatgaggccgaccggcccctgctgcttcgcatagtcgcagatcgtccggatggcctcgtccgctatcgtttcatcgccgtcctccccttgcgtcgtgaggttctcagagtcgataaagacagcgcaacgcgtcttggtgggcttttcgacggaaagaggtcggggcggcactgccgccgctgcttctgcgactcggaggagcttcctgcgctcgctgagcgtcaggcgcggcgccggcagccggctgggcttgcgcggcacaacctcaagcccaatcgagtgcactggattcaaacgagccggtcaagacgagcaggacagaggaggtgacgaggaaggcacgcacctttccaaggcttgtccgacgtcggcgtgacggccttgatcggaggcgtcgaggcgggggcctcgaaaacgaccttgaccgtcgacttggcggcggccggaggattcggccgcgcctgaatgccaggcatcggtcgcaccgacagtggcggcggcgcttgagccgcgagaggcgtcgacacgcccggtaaaggaggcggcgaggacgaggtggaggggctgggcggagcggacccgaccggcagaggaggcggcccgccggccgagctgctcgttgaggacgccgctcgcagctgctgcgacgtccgccggagccagagcctggccagcgcagagaacgacatgagggaggagcgggctgttcgcgagctgcgtccgaagagtggagtagttggaggggagacgaggcagaggcgttgaggtcgtcgacgctcgaggtcgactgaagcttcgtgcgacccctttctttcgggccttgttctttcgccggccgctccctccggaccgtcaccccggcccacctctggcctcctcattctgcccagctcgcctgtcgtgtcaagacgagatgctactcgctcacttgtctcatccgaggatgtccctcctcaggcgggaggaggattgacgggcgaccttcgagcgctcggcccccccaccgcgtgcgacccgggcgccttcacacgcgccgcccttgattgcagcagccctttgtccggcccggcacccctctccgctgccgagcgagccgagagggccgactgcggtcgctagcaggctagaaaacacggaccctctagaaggttgggaaggacaggcgagcgctgcgtggcgccctcctcctcctcgacggccgaacctacaaagagctatcgaggtcggccggctctttccctcttctctcactcacttcactcattctccctccacagctcttcagtcaacgcctctcgttcgttccatgtcccagcaagctgcccgagagccctcgcggccctcatccgccgtcgccgccggccccgaggagctgccgaccgtcctcgaatcggccgacgcttccctcgacagcaaagacgccagtgcctcgctcgacggcaaggatgccgcggatgagatcaatggctcgtcgtctggcggagagcaggcctcgaaggtcgagttccgcgtctacaagaagcgctgggtcggcctcgtcgggctcgtgcgtctcccttctcacggcttccctccgctgctttccctccggcggctcgcgctgacttctctttctgccgctcttcagttcctcatcaattgcatcaatgcgatgaacgcacagtggttcgcggcgatcgtcgtccagtcggcgacgctgcttgagacgacgttgacgcaggtcggttgtcttgagggctggtctccgcctggccctgctaacccctctctccgctttcccttcctccggcgaccgacgacgaccgcaggtcaactggttcgcaaacgtctgcaacctgacctcgctcgtctcgtacctcttcgtcccgtcgctctgccgcaagtacaacgtcaagacgctcgccatcgccgccgccggcctcaacattgtcggcgcctggatccgctacggcggcatccgatcggctagcccgtccgtccagtggggcatcatcctgtttggtcagatgattaatggcctcgcgacaccgtgagtcggccgcgctgtcgttcgtcgtcaggccgccggctgacctcagaccacccgttcctcaggctgtcgctcgccctcggctcgacctactcgcagatctggtttccgctctcgagccgaacaactgctacaatgttgttgacggtacgtcggctcggtacagcttacttttgccccggttgatattctcgcctgctacctcgggctcgcaggtgtcgaacccctttggaatggccctcgccagcgtcatttcgccgctcatcgccgtcgagtcgaccgacgttgccctctcggtacgcgttgatccaaggcctctttgctggctaggtctgacctccctctggcgtcctctgccagctgctcgtgatgggctgcgtcaaccttctccacctcgtcgccttcatcatcccttcggcgccgcccatcccgccgacctacgcggcctccctccctcctccttccttctctgatagcgtccggcttttcctcggcgactcgatccagcttccgttcttgtcgccgccggccgacgacgaaggcacccaccgctcgcggatgacggcgcgcgagcgggtcgacctctggatcgtttttgccgtctacacgctcctcgtcgcctgcgggacggctctccaggttgagatcgcctccgtcttcatgtgcgtgtgacgctccggccctgcatctgggcccctagactgatagtgcttctgtcctatcaggccctacggctactcgtcagcgttcgcaggtaacgtcggcggcgctctgatcctcgccggtctcgtcggtgcaggcacgacggcaccgctcctggaccggtacgctcccctttttcgctccagtcttgaggcaaagctctcacgctgaccctggccctcacctcgagcagttacttcaagtcgcaccatgcgtttgcagccaagacgttcatccccgttattgccgccatgaccctctctctcatctgggtcatcaagcccgaaaacgacataggcgtcgtcgcggtctttctggttctcggatttgcgtccttcgcactccttccgatcggcctggagctcggcgccgagatcacacgccagcctgaggcatccagctcggccttctactggctctccacgtgcgctcccttccctctctcgacctctgcgcgcgttgctgttcgctgatctgcccatgtccgcccgcctgcctcagactcctaacctttgcgatgatcaacattctcgacgcgactcgcgcgagcgacgacgcctcgcctccgcagaacatggacaagtgagctgtcttccggacgctcgaccgattgagcatgctagctgacccgcccccctcctgtctcgcaggggcatcatcctcgaagccgccttgaccatctttgccgccgttcgtcgctgctccacctacacctcgctcgacctctcgcttacccacccaccgccttcccccatcgcagatcctcatcttcttccttaagggcgaccagcgccgctcgcgcgaggaccgcgagcgtcttgagaaagagtcggcctcgacggtcggcgacccgacggtcgagctccctgaactggcggcgcgctagatctgaaccgagtcgtcacgaatcgcacatagtacaaggggggggaacaggggagaggaagagcattcgtttcatcagggacgcccgcccaacaggggcgctggcgcggcatcggggagactcctttcgcatactacgctatccttcatgtcttctcggccttgcgcgcgcgttttaaagaagcaaactgaggtgggcaagtgggcctgacgaaagacgcacgccggtagtgtcgacgggtcagccggacgcaggagcggcgcccgcagtctcctctcgtccccttcgacctctccctccccgacctctccctccctgacgtttctccccagccagacccactcgccatggattcgctctctgatctcctcctctcggtcaacgagaagctcgaggccgactccgctctgcgcgagacgattcagctgacagtcaaggagctcgaccggcaggtgcgcgcacttctcgcgctcgccaaccgcgtccactcgacgcctccggccgagctcgagcggctcgctcgccaggtcgagcagggcattaaggacgtcggacccacactcaaggaggtcggcgggctcatcccgcaaggcgagttcttcaagtgcgtctcccctcgctcctttctgaaggctcggctggcttggggctgacgaccccgccatcgacgcaaggtgggtcggccagtacaacaaggctctccaggacctcaccttcctcgccgccctcgcccacttcctgctccactcgtcgctcatctcgctcgccgaggtcactgagctgctttcggtccgtctacccttccgctgcccgccagtcgacacgcatgagctgacgtcttgttcctggcgcgcagctcgacgagaccctcaaggaccgcatcacgctcctcccagacgactaccttcagggcctcatctcgctcgtcaacgagcaagtgcgtcactagtgccgccttgggatcaagggtgcatcggctgacactcggacgctcgccgcttcggctggtgggatcagtcgcgcctggccgtcaactcggtcacgctcggtaactttcagatcgtcgagcgcatctcggtctttgtcggagagctgtttgcaggctatcagctggtgagcgagctcattccagttgctcgtctagccgagcaggcgctgactccctccctcgtcgccttagctcaacctgaagaacgactccttgcgccgtcgtgagtgccagccctacgtatgcaacggatccgctggcctcttgctgaccgctttcacaccccgctcgccaggctttgacgcgatcaagtactcggtcaagcgggtcgaggaggtccggtacgatctctcgatccgtggactcggtgcctcgcccgtcgttgctgccgtgccggccgagacggacaagtcgatggccgagtgaagggggtggtcggcactttccgggactcgtcaacgatggcgctctggacgaccttggatcccctcacagccaggcgaaccgccgcatgttggcgggacctgggaggctctcgcacgcgccaagatgccagcgacagctgcgtattgctcggcgcctctctcgcgagaagggtcgctcgcccaacagacggctatagcatgtagcccgtccttgcatcccgcctcgcttccgacgtgccaaagtgcttgcgtgcaaaggggagtccggtctagaatcgccgtcgaacctggcgcccgagttgtcgaggctgagaccggcttctgcggttgccagcgcaggggccgagctcgcgcgcgcgccggtcactgtcttgagctgagcttccatctaccgcctcctcctccgtctctccttctcttgtgactttcaaaggctggccctccctcccagcgtcagatcacccagcaccgtcgctccctgcctctgtgcctctcgcctagcatgggctgtgcgtcctcgcttctgctggagggacagaagcccagcgcgctgaccgtcttcccgcggccgttttcgcgaccgccctcctcctctagtccgcttcctcaacctcgtccggccgttccaggcgtttctcgtgcgtctgcctgctctcgtcgcctcgctctctgatcctttgcatgcatactgacggccctgctcgccatcgcgctctccagcccgaggtcaccgcgccggagcgcaaggttcgtgcctcgccctctgcgaccatcgcttccggcggccagcccgccctcgcctacccggaccgctcgctgactgctcacttgctactgccaggtccccttcgaccagaaggtcctctggacgggcgtcacgctcctcatcttcctcgtctgctcccaagtgccgctctacggcatcgtctcgtccgactcgtccgacccgctctattggatgcgggtcatcctggcctcgaaccggtgcgttttgctcgggtggtcgctgtcaagcgccgctgtcgaccgacgctgacaccttgtgctcggtctcgtgcagcggaacgctcatggagctcggcatcactcccatcatcacatccggcatgatcatccagctcctgacgggcgcccagctcatcgaggtcgacctctcggtcgccgaggaccgcgtcctctacggtgccgctcagaagcgtgagccctgcagtaggacgcttgcctcgttcgagaccggcagctgacgcgtacggcgcctgcccctcgccagtcttcgccctcatcatcgcgttcggccaggcgaccgtctacgtcctgacgggcatgtacggccagccgtccgacctcggggccggtgtctgcctgctcctgatcctccagctcgtcgcggcctcgctcatcgtcctcctgctcgacgagctccttcagaagggctacggcctcggctcgggcatctcgctcttcatcgcgaccaacatctgcgagacgatcatctggaaggccttttcgccgacgactgtcaacacgggccgtgggcccgagtttgagggcgctatcattgccctcttccacttcctcctcacctggaacaacaagtcgcgggccctaaaggaggccttctaccgcgacaacctccccaacgtcatgaacttggttgcgaccgtcgccgtctttgcggccgtcatctacctccaaggcttccgggtcgagatccccgtcaagaacaaccgcttccgcggccagcgcggcaccttccccgtcaagctcttctacacgagcaacatgcccatcatgctcgagagcgccttgacgtcaaacgtcttcctcgtcagccagatgctctactcgcgcttccccgacaacatgtttgtcaagctgctcggcgtctgggaggtgcgtcccgccgactgacatgactgcagcagggcccggccgagtgctgatcgtctccatcctccgccctcgcagcccatcaaggagtcgaaccagctcaagtcgacgtttggcctcgcctactacatctccgccccgcacactttcaaggagctctttgccgacccgcttcactcggccatctacattgtcttcaccgtctcggccgtgcgtccattgctttctttgcctgccttgtctcgcgcgcggaacgacctctaacgaacagctcccttgccgtcccgcagtgcgccctcttctccaagacgtggatcgaggtctctggctcgggcccgcgcgacgttgccaagcagctcaaggaccagcagatggtcatcgctggccaccgcgagggctcaatgtacaaggagctcaagcgcgtcatcccgaccgcggccgctttcggcggcgcgattctcggcctgctctcggtcgcggccgacctgagcggcgcgctcgcgggcggaaccggcatcctcatggccgtcacgaccatctacagctgttcgtcccctccatctctctctcgctcgaacgctcttcggggtgcagacatcactgacacgcctcgcctcacgcggccgacagactgggaaatcgccatgcgcgagtaccagggcgctgagacgggcggcctcgctgacctcagtgcgtccgacgttacctttgcgttttcctcttaagccaaacctcactgacccgtcctctcacgcaacagtcggctgaacgagccctgtatccgccgagtgccctcgaccggcccagcaaacggtctagcagcagggggctcgacgctccgctgcgcccggaaggcgcaccacaccctctggagtccagtggccaggcagacgccacctgccgggatccggcctcggctccaacacccctttaccccccttccctccctcccgcttcccacgaaatccaaagaaaaacttgtttccgcactaagacctcgctttaagcaagagggaggagggcagagagagggtgccggcctgcgacaacgtagcgccccgtcgtcattcgccgtgcgaggttttgctgccgagactgcgggcctccatccaccgcgcgagccagaccaagggcgagatgccctgctgcttgctccttctctcgcaaccaccaccgccaccttccttcctactactcgcgataatgtccgaccttacccgcaagccctcgctgccctcgcgcagccccgtctctgccggcctctcgccctcgccgctcgctgccgccggaccctcggccgcaggcggagtcgctcagcagcagcagcagcaccagctgccgccgccggcccacccatcctcgactagcgctgctgctgctgctagcagcggcgttccgcctcacgccgcggtcgctggtgcgcctcctcaggccgccgcctacggccagccgtcgactggcggtgcgcccggctcgctcccgagcgcggccgccttcccagccgcggcttccatgacggccgtcgcccctcctcccggcagcgcgcccgtctcgcgcgggccctatcccatctccgccttcgtcctcaagatgtcgggcgcctatcttggctcggtcgttggcatctggtcgacccaggacggccggcacggaaagaccgagaagctcggcggctcgtcgatcggctttggacacacgtcgtaccgctctctccggaacaagggcgtgcctgagggtgcgtttgtccggttcgggctcgaggtcgcgctcggcaaaaactgcgaggatcagaccgtcttcatctacgaggaggcgtgcgtttcctccctctctttcgttcgcacaggtgctgactcctccgccgtccctcctgcatccgccatccttcacagctcgccatgctcagcctactacgtcgcctcgggcacgtcgctctcgtctgacaagcttcacctcgtcacgctcgacgagtgagcggcgctccatctgtcgctatctcctttcccccatctcatgtcgtatgcccgcaacagcttcgcaaacagctctttcttcctccgcctcctatgcccttacctcttgctcttgccctttttatgctctgttgtcatcagtcctgcatctcgtcggtcaggccgggtctgaatgaaagctgcgtgactcgcgatcgttcaacgctggctggccggacgcgcagcagcgcccgacgcccgtcgacctctcgtcatccttgaccgtcacccctctcttgacctcgcagccttcaactgcacgaccatctcactcgccatgcattccgtgtcagcagacgtagccagaccggcgcgcatcgtggcggcacaaatgaactgacgtaccgctgccgacggccacctcttccggcctgccagacctcgccgccctccggccccgacctcgttcgcttacctgcttgccctgtctcgaatcggtccacgccctctggtagagcgttgcagcatcggtcgctggtgacacttacgggacaagcgtctgccggccggccactctgcagatagcatttaccgggctctttactcatcatggtcacgacaagatccttctctcgacgcccggtttaacctccgacgtctaacccggctcgacatcgaggttgactcttcctctgtcggctctctcaacgctcgtcgacctccgcctccaagatttagtgtccaacgacatcggacttgtcgagaccattttgaacgcggttggcagtggcctacggcttctccacctcttttccgacagcgccccttcaaaaacctcgagctcaatctgccctcgctttacccaaacctcgtccatctcggcttgtaactcggccaggtgtgggctgagtccgagcgctacctttggtcgtcgatacggctcaagaccctccttgtcaggccgccgactgaggatgccaggtggccgacctttgactggttggacgctgtcggcctccttcaaccgcaggctctggttcatccagtgacttggacgcacttccgcaaggccgcgaagagtgagggctagaaagctcgccggctatttgaagaacggcggccgcagcgttctacgaacagacggacttggccaagttatccagccggatggtcgtgcgatcttgcgcgctcgagttttggcctgacccctgcgctgaccgagcgctcgaccccttctcacagttgtgccctcctcatgctcgactccctcccacaacagcgcgtgaacgctcgagtaatcttctcgaccgcttgtgcgtcacccgtgcgatctcttccgctgctagccctctgctgaccgacttgcaccgttttgaccaggactcttcatctgcaccgctcgatctttggcactcgtctcccgcgcggcgtctcgatgaatgcgctctctgccccacatatctggaccccgtgctcgccggtcgggagagcatgcaattaaggcagcagcaggcgacggcgtgccgactcagccgagggtaatgtagctctcctcctcgtcgctctcgtcctcggcctcgtctggccccatgaggccgcgcgaatagaggctggcaatgacgccgaagccgtcgtcggcctcttggacctcggccttgaagccgtcgtgctcgccgcggctctgggcatgggccgaccggatctggcggacgagcgagtgctgctgagcgcaaagcgggcacgacggttgcgggacgtcgggcaatgagctgcgtagagagagagagagagagagagagagcgggtcagcacgggactgcggccagggtaggattgccccgagggtcgcacctttggttgaacgagtgcttgcacatgaagtggatcgccggcagctcgagcggggcgccggtagaggcgtcgcggttgacttggatgaccgtcggctgggacgtgtcggtcagggcgtcaatctcctgctgccgggcggccgtctctgtccggtacgactcgatgagcgtccgatcctaggagaaggccagagcgaggcgtcagtctatctcgcatatacacgagacggacagggccagacgagggactgaccgactcaatttcgacgcgcaggccgccgaccttctgcatgagccactccttcacgatgccgacgctcgcgacatcgttccggctaaggacctggacaacctgcaagggcggcatgatgcggtcgctgtcgatcacgtcgagcacgtagcgcaggtcggcctgatggcggctgaggaggccgttggacgaagtgaggaagcggaggacgagcgggtagaggtacggatgcgacgggccgtagcgccgaagctggtccatcacctcgtcggacggccggcggggggtcgctgttgctgctgctgctgctgctgctgctgcgcggccagacggctccttgatggtggcggcggccgccggcagcgcggcaatctccttctccttgtccatccagaagcggaggacgtcctcgtacatgccgagggcctcccagaggacgacaaggccgtcggtaaaggcgttgatcgagcagagtatgagcgcgtgcgtcgcgtcgtacgggatcgccccggcctgctcgatcaggcgcagcgccttctgccgatggttctcgcgatcccgggcaagcgtccggccgtcctgcgcgaacgtcaggtggagctctaggatcgtgttccacattgctttctggtccgaaagatagccgtcgtcggctggaggtgcttggccggccgtctcttcgtagacgggcggaggcggtgcggcagactttgccttggctggcgaacgcgagaggtcaatcttctggttccagcgttcgagtgcgaccgcctcaagaaagcgcaagaactccgtcgggtggttgacaaagtgcgcaaagaagggccgcggagagggaggaggcggcgcggctggccgggacgacgtcgaggccaactccgcgaggctcgaagcagactcggcagcgaccatcggcgctgccgtctgcttgcgcttctcctttgccgtcaatggtacgctgccgttggtgccactctccactggggcagcggtcgacgagagtccacccgggaggacagcagccgtcgccgcggcggccgcctcaaccgccgtccgaccgagttgcaagcttgagttgaagacgttgaggtaagccggcgacgaggcgtgggctgcaggcggagccgcgtcggcgccgctgtcgttcgcagcgaccccgtttgacgcagcgccattactctgcgacgcctggcctatcgagggtaagcggccgcagcagtgatcgattaggagggtcgtcgttgcctcgggctcgtgcttcagcatacgcttgccgtagcggaggaggttctcgtgggcctgcggtcgaaggggtgggaaagaaatcagacgcgattcgagcgcattgccaggagactgctcgacgcacctgatcgcgctccatgccccggaggactcctcggacgccctcccagtctgcgagatcctcaacgagcaccttaacaacctcctcttcgcgcccccagcgcctcgccatccacacggcctggccgtagaagcccgcctggcggcagaccttgatggccgtctcgaggtcgaagctcggctcggccgaagacgacgacgaggtcgagcggatgaaggcctcaagccgggggaggtcagacgtctttgtgtagcagttgaggaggagcgtcgtgtggtcagagttggcgaggccggccgtgtgcaggtcttgaaggtaggttgtcaggtgcttgatcttctgggcgtcaaggaactggagcagggcgacagaaggggtaaggcgttcagccagtcgtctcgcttggtcaagacgcggcgcgcgctaagcggcgggcaggccatacctttcgaatgacatagcttccctggacgccgccgccgatcgtcttgacgtactgcccgacgctgccctcccagtcgcccttttcgtacagccagtcggcataccgccgatggacgtcggcgatcccttcgcggccgatcgagcgcgacttgacgagctggagcgcgagcgtgaagagcaccttgtcgtacagcgtctgtaagacgtcgtcgatcgctgacggttgcaggacggcgacctgcgagggaaggaaaacggttgcgtcgtcagcacacgcggtcgaaaggcagtccaggacgacttcaaccgacgacgcaccttgccatccttcgacccgacggcaagcgcgccgctgcccgagttgcgccagagtccccagacgccgccccctcgaaagctgtttcgccaggcgatccagcccatctcgaggtcaaggaccgtcatcctccccatgtccttctcgccctgcttggccagctgccggacagtgcccgacgctgcggcgacggagggcgcgaacggcggcgagaggacaacgacgcttgcagagtagggcgagggacccgcgagggacgggacggggtggagggacgagagggccgagtaggtcgctgggagggcaaatgaaggtccgcggcctgccggcgtgtagacgacgatgccgccctcttcgcgcgcgaccgcgaacgcgacttcgcgctcggtcgaggggaggacgacaccggccgtgcagcccaggccggcgccggccgcctcgtcgagcactttaacgtcggggcttccaccgagcgaggtcgggaagccgccggcccgcttcgactttgagagcgggtggacgagcacacgggcgagggttgagatgaagaggtacgtctcggatgtgcttgacttgccggccgaggacgacgcggccgacgcagcgacaccgccggctgttgctgttgttgttttgctctctggtcgaggctcgcggaacatgagccccgtgacggcatcgccgttgccctcgacgagaacctttggcttcggcaggccggacccttcggccgtgagcgactgccagatgtggcggaacaagagggccgtcccgtcgccgaagccaatggcgaggtgggcccccgacggcgggaaggcaagcgtcgagacgggcgatggtcgggcagaggggcgcagcggcacggagcggaggaggcgcggcgctgggggcggtgtcgctgatagcgttgagggcgggagggagaagatgcggagcgaggggtagggcgtggcgtcctcctgcgcagagggaacaacagtgagaggagtcagcctcagatgcgcgattgatctgccccaagagatgatgctgctgcgagacgcaacgcacgccgagtgcgatgaccacgccgcgggcctcggcgaggtgtgtacaccggccgccgtcggcaaatgcgtcccacgagaggcgctcctcaagctgccgaccttgaaagagccgcgacgcaagctgtcagctcctgatcggcctcgaaagggagcagccgatacgaggcggcaaggacgtactgtagagggtgagccggtgctcgacggcgacgagcaggctgccttcgaggcccgaatacgaggccgtcgcactgatcaaagctgcagtctgtcggggacgagatagaggaagcgttcgtcagcatccttggctcgccagacacgcaggcagcctcttgggggtcgggtcgggccgaggggagggacgcacggcgaagggctcgggcaagcgctcggccggctcgtcggcgctctcgtagaaggcaaattgccgccactgcggaggctggccggccgcgggcggtacgatcggcgccatccctggatgcgagcgtgtagggagaggagagaggcgaaggtattgatggatgtaagaggagagagcgagatgggctctgggtgcacaagggaagccgttcggggcgcgcaggcggccgatctctcgagatgaaactgccttcgactttaagcggattatgattgacttttgatgctggattatgaaagatatcatgatcccgcctcaattccccgactatgatggcgcgagtgggcagaggcaggcctggggccccgtcgcgcggtgccgtcaaagctggtctccgcgggcgcacgccgccgcctccatcgcctcgtcctcctcctttcaccctcccacaccaaccctcctcactaccttcttcaccctctccaacctcaaccacagctcaagaccagcacgatggttagtcagcgcagcagctggctcatcccttcgtctctgagctctggttgactcaagcgcgtctccttcctgccatcagggtcaaactttgtccgagccaggtgcgttgtgtcatggcttccctcgggcggtgatctggccagctcccagctgagctcactgcaaggagaacagctgctgacccaaagtcacacgatcctccttcttctcgtcctacccttccgacccgatcttcgttgtctggctcctctcgcgcggctcggacccggtccatccatctccagtcgtcgagaagcactccggcaagggcgcgagcaagcgctttgcctacgcctactccgagatgcagggctggcggatatgtgcgtcttccttctctggctccggacgcctctctcggctcggacaggtgggagctcgcgggcggatggtgcgggatgcaaatgggccaaaggcgccgaggcgaaggaggagggaggtgacgtattgctcagccgcgaggcgaggcagaggccctttctcgccggattgccaggcgtcggcactcagcctcagcgagcggcgtgactgtactgctgcagagcagggccttccgtccagcgcgccgccgtcatggatggtgaggcgaccctcaggacgtcgaagcctccttcggtggctcggcctggtcgcgcgacctcccctcctccactcctcagcttccgtctctcgccaagtgaaatgcccagctgaacccctcccaccccctccctctctcacgcctctctccagcgatggaggatgcgcacgcgacgatcctctccctcccgccgcgggccgccgccgacgagccgaccaaggagaaggtcgagtctgcgccgctgcccgagcaggcggccgtggagggtgagaacggcacgacgcagccggccttctttgcagtctatgacgggcacggtggtgcgttgtcctttctttccagcagctcggctcctggccgggctggcaatgcccgcctcgatctgccccgcctgactcaacctgcgccttgcgcttgctgctgcaggctcgaccgtcgccaagtacaccggccagacgctgcacaaccggctcgcggcgattcccgagtacgccaagggcgagtacgaggtggcgctgaccaaggccttcctcaagacggacgacgacctccgggccagtgcgtccttcgtctcgcctccttgcgatgtgcctcctcttaggacaggagctgacctgacctcctcgcctgcccgcaacagaccccgagttctcgaacgacccaagtggctgcacggccgttgcctgcctcatcacggccgatgaccgcatcatctgcgtgagtctgcgctcgcgctggtggcgaaggagtgcctgccctcgtctgacgcccggagctgaccgcgcgcgccattacgttctgctcgcaggccaacgcgggcgactcgagggccgtcctcggcctggccggtaaggagaaggccatgtcgcacgaccacaagcctgtcaacaaagaggaggccgcgcgcatcaccgccgccggcggctttgtcgagtacggtcgggtcaacggcaaccttgcgctgtcgcgcgccgtcggcgatttcgagttcaagcagaacttttcgctcgatgcggaacaccaagcggtgacggtcaacccggacgtgatcgtccacgagtggacgggcgaggaggagttcctcgtcgtcgcgtgcgacggcatctgggactgcctgagctcgcagcaggtcgtcgacttcacgcgccgggcgattgccaacggcgacagcctgacaaagattgccgaggacatgatggagaagtgtctggcgcccgactcggagctcggcggcgtcggttgcgacaacatgacggtcgtcgtcgttgcgctcttgcacggccggagcgaggccgactggcgggcgtgggtgacggaccgggtcgagaaggccgtcggttacacgacgcccgagtcggtcccggacgtcttcaaaacgccgcccgtttacaaccggtcggcctcgtcgtcgacggcatcgacgacggccaacggcaggcctgctggctcggggtcggctggcggcgccggcgcgcgcaaggctggcggaggagggtcgagcctagccgagcttctccagggcggagggctgggtggggtcgacttgaagcagctgcttgccggtacgggcatcaacctctcggctgctggcgggcttctgtcgggctcggccgatgatgatgaggatgacgacgaggacgacgacgacgacgacgaggtgcgtccctgcccctcgcattcaattcgccaaccttgcagggctgactttctctctctccttcaccccaccccctaaggccaaaccttcgacgaccggcggccacccgcattacgtcgcctcgccgacgaccgcgtccgagaaatctgacgcaggcgacgcagagacgatggacggcccgactccgacgaacggctcgaccgagtcctcggtcccggctgcgagcagcgacaagtagagccgcagcgacgaggaacgtttcaaggcgacactcctcgctccggctttggagtaaggggtgggagaggagtagtgcagggtgcggtgggtcgggtgggcggacggacggtggtgggcatcctctatttttgccagtgcagtctggcgcggaaggggcctcgaaggagcaagggtcctccctctcccctctttcttcacctctagctttcctcatcctgctctcctacctctcctcgaaccccacctcttccttcacgaagcacgagaagaagatcccgttgtaaaactagacgaaaccccccgacgcgcagggcttgtgtccgtccgacctcttttccttctcctgcgccaagtagccaatgtcgattgcccgtttgtcagtcctggacactcgccgtcgtctgtcgggtgcgtgccttactggcctgtccgcactttggccgcagtggccgaccaatagcccgaccggcgcagagacatttcagcgtcggccctttgtcgcgcctgtcgcggctccgaccgaccggcaggcgcaccttgtcatcgctcgccgtctgccagctcatcctgacagggcccgacaacgagtcagagctcttagacggccaaccagcagcaccgcttatagagacgagtctcttgctctagctcttgccaaccatctccctccgaccgaccgtctgcagccagccagccatgtcggccagcccacccaacaccaaggacctctcgccccctccgactcccacagccctcgagcgcggcgagcacatcaccgtcacctccaacggcggccatgcccacactcacacgaatggccacagcagcagcagcagccgcggcggtggctcaccccggcggtccatcgagctcgccgactttgggatcgacccaaacgaccaaccgccggacgttgttgatgctcagggtcgacggccgctgcggatggggacaaaggacgagtggtgggctcttgccgccctctattgctcgatgtgtgcgcgtcgtccccgtccagtcgctcgctcgctcgtgcttggagctccactcgctgaccctgacactctcactcttcggccgacgacagtcctggctggctggaacgttcgtccgaaccctccccttcctcccctctcacccttccgctcaacactacgctgaacccctctccttcctactttctaggacgcgacgatcggcccgctcctccttcgcatgcaggagcactacaacgtccgttcctctctccttccttgcacgtcaagcgcggcgcagcgctgccctcgactgactgaccatcccttcttcttctatggttcgtccctctttggctggcttgtagctgtcgtacacggtcatctcgctcatgtgcgtctcacccagcgctgcctcggcgcgcttttaaaaagggggagcaacccattcgcaccggagagactgacgctctcttccctctcccctctcggacagagaatacctcgctctcgaggtgactggcagactcatcctcaattcacgtgaagaaagatcaaaaggagacatcgtgaggcgacggctgctgctgtctggcgagggaggcttgaagggtcgggaagaagggagtgtcggggtggaagagctggacgggtgaggggtgggaggaggagagaagacaagcagccgacctgcttgtggtgaccgcccgcgcggggcaacgcggcctcaaacggacgctcggagcagtcagccgtcgcctcacgatgtctccttttgatctttcttcacgtgaattgaggatgagtctgccagtcacctcgagagcgaggtattctctgtcctttcaggggagccatggtcaagtctcgagaggaaagcgggcctgcctctcgtcctgcaagacgacggcggctgacgcgcagcagcccccggcttgctcactcatgaccgggccgacccgcgcgggagcagccctggcctccctggccaatcgagaggccggcatgaacaggtgtgatcatcgtacggagaagacagattgaagacgggtcggatcgacagcgaggtcgcctcacctcagcgaacgacagccagcggccgagtcatccaatcgggcctatttgacaagtcgctttcgccctctcacttgcgtctgtcaaaggcacgaaatcgactttggggttgcgcttcggcgggacatgatatgatgtgcgacgcgaggcgctacaacagagctataacattcgcgagcgagcgatgagggataaaacagcgaggccgtgatagggtgtagtttgtggcgtgtatgcgaggcgtcatgcggtgcgattccggatgagggcgcgggatggctgactagctgtgtagggtagctggcgagcggcgtctatgagagggcgaacaacgaggcgagaccgtcggagcggccgagatcgatctcgccgtgccctgacggaggggtggggctgaacgcgcacccgtctgtcgggcgtcaaccgtcgacgggccgggagtttgccggcgaggccgtcgatgagggctgcaaggccggaatgtcgagctctaggctctggcgggagggtcaatgcgcgcccctcccgcattttgttctggaagggtccgggggggtaccagatgggcttcaagcgtaggcggccgagtaggcggcgtgtaggaagaagttgccctcgtgctcgagccccgccggcgagccatcgtcgccgtacgtccgctggcgcgcactctcgcgctggcgacagaacccagccgcacgctcgaggacgaggccggccgggaggaagcagtcgtagtcgaggtggaggagaagctcgcgctccatcgagttgatctcgcgcgtcgtccacggcgtccggccgacaaaggcagaattgaggtacgagacttcggtcaccatcttcatggccgtcatgtaggccgagaagacaacgcggaggacagtgtccttgacctctacgaaaggaaaggagagacagggttagaaggtgttcgaggcgagagaaaagcagtaacggaagagagacgcacgaccggtcgatgagaggcccgggtgaaggtgacggaggcgctcgagaaggatgacggtcgagatgaggacgcagaggctgtggggcgtgagcgaggtccagtactggcgagatcgacaaagcaaaggtcagcaaaagctccctgatcttatcaagaagggcagtactcacgaggaggtacttggcgaggagccgctggtcggcgacggcattccgctgcgcctcgaggtcggcgccgctgctggggatgaggaggtggatgacctcggcagccatgactggaaagagaagtggcaagcaaaagggtcagccacaagaaagccatggcgccggccggtgaaatgacgagcgcgcttagggatgcgaggaaggacgcacggcagtctgactcggtcgtctcgaggcgcatgaaggcatccatctgggagcggttgtcgatgtcgaggccgaaggcgcggagaatgtcgtgctcgccgtggctcttgctagaggtggtggtgggcgaggacgggtcgaatgcgagggaggcggccgctgctgggacttgaacgagccggctgccggaagatggcccgctagcggacgacgaccggcgggaggacgcccggctcgagcaggacgggctctggcagccttgcgagagcggcggcgacgggagggcgtagagggcgtgctggaccgactttgagctcgagggctggccgcagccggttgctgggtggcagcagctcatggccgagtcgggcgacgggagggcgatggcgtaggagggtgtcgggaagatcatccttgcagttggaggctgagggtcgaggtggctgtgggttgaggacaggctgaaggcgtcagggatcgttgaggtattgaagcggtggcgacacggaaaggggagtgggagagaggagccgacgagagagaggagggagtggcgagtcttgtagctgagccgccctcggtcgggcacggtcgggtagaaggggctatcggacgtcgggcgcctagaggaggagagagatgggctcacgcacgcagagaggtcggccgtcgtcccgttcgtcaaaccgagcgtcggggctttggggccggaggagtgggacggccgtcggttgcgagacgagctagaggcgaggcttgcttggttcgacgatcgggtgtgaaggcggccgacggggcgtgggagcagaaggcgtgcggaagaggcggtgaagggaggatgaaggtcgagagagagaggcattactgctcctccctcttcctatgtactcgcggtgaccggccggcctcctgtcgtctgtgctgagtagggaagcttactgtcggtcggccaggccgtcgtggcgactgactgagttggcaggagacaagcccggtcagctcggccgagcggcaacgtcgtccgtcgcgaggtcgacgggaccttttatcgcgctgaaacgcgcctcggtcggccgaccggcccgcagctagccaacaggaactcttggctcgcccatgcccgtgcgacagcacgcaacggatgccagcagccgggcgacgggaggagaagcaacgagacaacgacggccgacggaggccgggccagcagaagctgagtactctctcgtacgagcggcacgtctcggagggaagacgtcgccaactgcgcggcggtcccttcctccacctctggcctcttcgctgcgctagcagctcttgctctctatccgaccgacgaccgagcgcgcgcgcgcctcggagcgctcctgctgcttggccgccttctgctgcactgccgccgactcgggcgatcacgacgtcggcctattggcgtaggcgctgatgagctgaccaccaccaatccgagggagggacacagggacgatggcgcgcctttgctcggctgcccgtcatcgctccgaaaagtcctgcaatgcttgccagcagttggcgagcggctcccaccgaccagccctccctcctatcgtcccggcgtcggggccggcgggtcggacggcgaatgcgccgacgtcagacgtcagcgcggtggcctgaactctaggaggggcgtctcgaccgaccgaccggccgacaaggggcgcgccgccagctggcgcttgagggacggtcagacaaccggccgcaccgcctgcaggggagatggccggagcgcatcgccgcgccgggccacttccagcggcggcgacgacgtcttcccgtctgctgctactggccgtcgcaggacatagccggccgcgaagggcgccgcccaacgacgaaacaagctttccaagcttgctgccgtcgtcgtctcaaagctcgaccccaccgcgctcgctcgtcctgaacaaaaggtcgcaggtcgcgaccttccgcctcgcctaagccagctgcccggacgcgcgacccgatcgctatcaaacagccacgcctcgcgtgcgacagggagcaagcaggaagccgcgccccgcttcgaggcgctgcatggcagtccatgcagccttcaggcgagattcagatgcggcaagcagggttcgtgaagggtcgtcaatcgtcagagtataaagtgacctggggggtcaagagggcttgcatgaggggtgtgcaagggtacgaaatgccggtgtcggcttttaggaaggagagaaggagagacagaggaaggagttaaaggggcgaccggcgtctacatgaagaggagacccgactcgcgctggtactcgcgccacgtcggatcggcctcgccccggtctcgccggccccagacgtggcgaatgacagtcaggacggcgtcgacgtcccatgcgctttgagaatgaacgcgggaccgttagtgctctgcgcgctgaggagaggagagggtgaggacgggacgaaccagcgatcgcgcattgcctgtcgattagaacgaagaggggaatagggaaagggcgcggtcagcagtaagaccgtgtacttgagagacgccagggacagacctcgacgatggtcctgcgaaagacagacggttgtcggtttggtcagcaaggggagcaaccgcgagcgctggcgacaggtcgggtgacgcaccgagtcgagttacggccgagcgtgttgtgcagcatctggaggcagccaaagatgatggccggccacatgaggctgtgcaggcgcgcactggattagccttccttcccaatgaggggcaaactggaaacaagacgagacggaccagacgacctggccgtttgcaacgttgcactggaggagcagctgctggccgaggtaggccgactcttggacggacgggtcgctgtgcggcacacggaggacgtcggtgaggacgaggattttaatctgcaggacggagagtcgcaggcagagggtcagcgtccatgccgtctggctcggcaagtgagccagaagacctaccgcgtggctccagatcaggttaccgtactggacgcggctgagaacgacgttcgggtcggcctggtcgccctcgcccttccagatctcaagctcgagcaggagctcttgcgcccggccgagccggtcttcgaacgaggtgggtgcggcggggtggaagccgacggccgcgctggggtcgaggcattgggcgacaaggatggcggtccggttgaggagctcgacgaggccacgtgagacgcccaggatcgtctaggatcacgcattcgagggtcagttgaccggacgcgatagtcgagtgctgctcggctggactcgcctcgacagtctcccagtcgctcggtgcctggctcgggtcaaggatcgcctgccccggcggaccctggctcatggacgcaaagtcaaacctgcaagagtaggcggcacgagcatgtcagcccatcgtttcgagcgagagtcgcaactaaaagggtccagacggaccaccactgtggtcaagcggaagggcaaaaggcgtcagcaagacattcaatacggaaggccagagcagcacgtaccgggcagaagggctcaagcatgacgcgcggcgctgtgcccgctccaagactgtcgcacatatccatcatgaccgtgtactcgagcgacgctcgggtccgcatgagcgcgctgtcgtcggcctcgccccggcccatcgccgccctcgtgtcggcgagcatcgacgccggcccgccgcgcatctcgagcagcttgcgcgcgacgtcgaggttcggcttccaggcggttgtggcaccgaggatcgagttgagcgtgagcgtcagggcggttgagatgaggaggtcggaggccgagcccgacatggcgatggctgagagcagcagcgcgtgcgaggtcgttgcgagatgggccgcgagcagacgcgagcggtcctgggcctcttgcgcgctcgacgacgtcggtacggcaagcgagagcgagcgctgcgagaagtcctggtgcgtcggcgagtcgcccgatgccaagtctgtgtagcggccgttgacgagcgaaacgaggttgtcgacttggcctcggcggcgctggacattgagcatgcttgactggtggttcgacgccatcgagagcagcgagaagagcaaagcgtccgaagggatgctgagccctcgcggcgaggcgacgagctgggccggatggaggaaaagcatcggcaggtgcgaagggatgctctgcgagagcgtcgcgccgttgccgagaaagtggctcatcaggctgcgctcctctggcgacgggaagcacagctggagctggtccgtcggcgtctcttgctggagcaggttgtcgagcgcctgctggcgccgcacttcggccccggcagggaggggcatcggtgcgtgcgccggaggcgagacggacgacgccgacgacgcgacggacgttgcgcccgcgcgcgagctgggcccagagacgtcgctgaacggtcggtggcggtcatcggctgcaaggtcgatggtcggcggagccgtgtcaggagcgaccggggccgcagcgacggcggggaggggcggctgcagcggcccatgcttggccattgcagaggcattctgactgacgctgagcggccaggtacactgcgcaaggaccggctttcgtctcggtcagcaagctggcaactcccgagccttggcagcaaagggcgaggaaggggaaagtcggaacggacctccttgttcgagatgacgcagcggacgcagatgggcttggtcgcgtcgcagcgctgcttgatcttgcggcaggccagacagccgtcgcgcgagcgcgtgaatttctgcgagcgcttcttgcctggcggcggcggcggaggggcaggcgctgtggcggaaccgacggcaggccggtcgtcggcggtggtcttcgctggcccggcggacgagcggcgtcggcttgcggctgtcgttggcaggccgtccggcgggcggaggtcgacgctcgtcggcggcgagggtgaggcgacgtcgggcatcgggttgagcgtgtcgtattggttggacagcatagttatggcagagggtgagcaggcgaaggagaaggtgtgagggttagaggggcaagggcagtcgacgtcgctgtaatcagccctctttgcgcgcttggagcgacccgccgccaaggaagaaccccgtccggcccaagccggggccttccgggcactcggcgcccttgccagcccacccattcttgctcagccatccagagtcatgtgacaaaagtccagtccaggaaagcggctcttggccggccggcccctctcttccaagccctccctcccccttccatggctgaccgtctccctccatgctcggtcgcccgcctgaccaacttttgcctaggcgtgcctctgccgaaacttgtccgcgaatccggtcgacttctgggcgacggaccctttgcaatagagcgtgacgagccgggggcgcagccactcgagcgccttggcctcgacagcgaggcaggcgtcgaggtcgagcgaccggaggaccgcgcggccactcctcggcggcggcggcggcggcaccgcagacgcggacgaggcgactgccgtctcgggcggcgtaacagatgcgaggcgtgaggcgacgagccgcaggattgggccgccggtgaccgtctccgagtgagcgaggccgaggacctccaggcgaggacagaggtcggccggcgccgcttgttggccgacaggcgctagcgtcagcgcttcgacgagcgcgttcgagacgttgcagagcccgagctggagctcgacgagcgccggcaggcggccgaggtggcggatcaggagcggctcgtcgagcatcgtccggacgaggttgagcgacgtcaggccgagcaggacgtctggcgccgagggcggaaatagaatggccgcgtagatcgacgactgcgcggttgttaagcgcggctgcgagacgtcgagccgcttgagcgccggcaagtcccactcgagctcctcgaaaccgtggatcgtcgactggctgtacgtgaaggtctcgagctccggcagggcgatcaccgccggctttcgaggagttgcggcggcggcgttggcgacgaaatttcgagcgtggccgaacgagttgtttgtgatcgttagctcgacgaggcggggcgcccgactgagtacgtcctggagaccaaagcccctgcggtcgagaaggcccgccgcgaggtagcgcgagttgttcatgacgagccgccgcatctgcgggaagggcgggagcgcgaccggcgacgagacgtcgaccggatggacaagattgacgctcgtgagcgcgagcgtctcgacctgagcccacgagtcggccggcccgtcggcggcggcgatgcagctgtagagatcgtcccagcagatgtcgttggccgcgattccgagcatgctcgcctcgcgcgagatgcatgtcaggtggatgtggcgcagggcgggcgagaacgcgtgccggagcgtgctgatgatgtcggcgaggacgaccgtcggcgccacacggaggtcgatcagcgatagcgtcgcacaatgtgagacgatcgaggttgcaatgttgccgaccgtcggggggatgacgagctccctcagccggtcgttcgccgcgctggcgtacatggccagcttgcctttgggcttccgctgcgacagccgcaggcgcgaccagagcgtcggcgtcgagttgacgacctcgcgccagcgcacgcagacgccccctaggcgaagcggggcatctgcgttcagcatgacgctctgctcgccgatgaggaccagcagctcggtcggaagccggtcagtccagttcaggcgacgctgacgagcgctcgagtcctgcttatgcgaggacagggcgagcgccgcgagacgcgtctcgagagccggtcggagatggtctggcgcaaaccgcaggccgtgctcgaggagcgcatgagcgcggacgaagttgggcggcgtcaaaagtgtcgagaggtgcgagccgcggacgtagccctgacgaagtgcagccagcccgtcagcattggggtccagctccctcgagcgcagcaccctgggtgcagaccgaccttgtgcgactctgggctcagttcgacgagcgcctttgcgttcaggagggcgtccttaatccgaccgagcttttcgagcgtcgccgccctcgagtcgaggacgatggctttgcggccgccgagcttgagcgcctgtagagagggagctgtcgcgtcagctcgcgtcgtcaggtcgacgcgtcgggaagccaagaggacggaccgcatcaaaggctttaagggcggcttcaaactcgtcagccttgtaggcggcgacgccggcctcgaaggcttccttccagccggcgtgcgggccagccttgatcgattgggcggaggtcgaggccgacgcggcgccagcgatcttggccgggacgacgagctttgagctcgaggccgtcttgctcggtggcttgcgcggaggcaggccaggctggatcttgggcgtcgacgaccgggcagaaaacatggtgaagggctagcaaagggtgtcgggtagggaaggagggcgcaagatgctggtcgggagaaagattagaccgagggaggcgggcgagcgggagacgcgactgggcgagcggtcaaagcgacgagagcgggctcacttctgtcgtaaccaaatacgattgcttagggtaatcagggctggccagggatggtcgaccagggtgtcgctgctcttataaagggcgagaggttgtgcgaggatggagggcgagtggagggaggtcggtcgcagtctgcagcacgtcggccgtcccctctgagcgtccgccggctcgactgacgtcccacgcaagccagccgccctccacttgcgcacagcctttccacgacttggccagctcaagcggtcaagagaacacgggaagagatcatcagaccgagctagtcgtacagagacgaggtgagctggaggcagagacgggcaggcaggaggggaggatggtgcgccgccggcccgggaccgcagcgcgcggccaacgaggcggcgaccgctcgatgaagaggtgagcgagacggacgcgtgaggaaaagcagatacagcaggcaagagagagggaaaggaggagagagtgaggtgtatgtgtagagcagggcaagaggatgatggagaagcaccaagcaggcaggagcaggcctccaggtggaagggctgcttcggctctagagaaaggccgaaggatacgggtagcgagatagtgctggcgaggtccaagacgtcctttagcaaccgtcgtaaagccggttgcggggccagctgaagccagcgtcagaccagatggtcgcgttggggttctaaaggggggaaagaacgtcagggtcagcctcggttgtggcaagtagtattgagggcttcgacgcacctggtacgcctgcgggtgggcgtcgatgtagtcggcggtcgggtagtcgggcgggtcctggaaggcacaaaacagaggagggacgtcagcatgttggaagtgagaggcgcgacgataggtgcgagactaacgcagccccagttctcctcgccctcgatctggtagacgcggacgtagtcgatgagctaaggggaaggcagcgttggctgtcagcgtcttctcggcggaacccgcaagcagtcgagagacacgcaccatctccgccggccagacgaggttaaagaagtcgaccttctggaagccgtccgacatgccaaagttgagaatgatcgtcatcggctcgcgggggactgccgaaaaccaggagagatcaacggccgtgcgaaggagactccgttacagcgagcaaaagacgtactgatacgctgaccgatgccggtggccgcattcgggccgacgaccgacggcttgagctgccaggtcggctggccgccgacgtgccaggtaatgtaaccctcggactggtcgtcgtcggtgccccagtattcgaggccgtacgtttcgaaattgccattgtaggccgtgttagtcgggatgtaggcgaggccagaggcagcctgctggaagggcccgccctcgtacgagttccacttgaggacgtccgagtcgaagacggtggcctcgtcgcggttcgagtgccagccgtcgtcaaagggcctgatgcgcgtgtcggtcgaggcggtaggtcagcgaccgacttcagcgagacgagcgcaaactggtccctgggacgtacgcaagctggaacgactgcgagacctggccgagctcgttttcgacgtcgacctctgcaagagccacatcgcaggtcagcctcgaacaagtgcagcacggcaacagattcggctggttcagacgcacgggcctcgaggatgtcaatctcgggcgcgccgcgaccgacgcggacattcggaccggggtggtcctggcccgggcacgtgcatgagctcagcttctgaccgggaaggaatgagagcgagcctccgttgtagcctgcaaagaacgacggtcggtcagcagcgttgacaaggggcgaccactcgagacaacgcaccggtcgtgagcgcggcttccggaccgctcccgttgacaaacgtctggttcgggaaggttccgacgtcgcacgagtcgtaactgtacggccacgtgccctcggtcgtcgcaccgtagctgcagcgatggaatcaagtcagcaggggaagcgagttggcagagctcctctactcgaggaaggcactcacccaggacggccaaggttgcccatgagccagacgcccggccagtagccaccgactttgttgttgccggggagcgagaccgaaacctcggtgtagccccgggtgaagcagaacctgcgaaagagacagccttcggtcagcgtctgtcgtcgagcggacgatttgaaggcggcacgcacttgttccaggtctggagcatcgcgctctcgaagttgaggccgtgcgactcgcgctccgactgggtcaggacaaggttgccgccccgagtgacagcgccgcggggcgagtaccactcgtagtcggccgtcggccagtaatggaaatcgacggcttcccagaaggggtcgtcgcctggccagaaggtccggccgtcctcctcaaactcgtccgagaagatgaggttgtacgtcttgccgtcaaagccgacgcgcgacttgacattctcgggcgtgtcgcggtcaatcatcgtcggcaggttcgggatgtcgggcacctgcccgctgccgttgatgccgccgaggctgatagagatagagttgaaagtcaggcaagcggtcagtcatcgctgaggtctcccttccagagagcaagaaacgcacttgaaggcgccggtcaggctcgtgcctcgatggtttttgaagtaggtgatgatcgggtagccggcaaacagcgtgaggagggcgccgatgaggacggcgagcgtgagcacgttgaagaagcctcgggtcgaccacgcccactttccgcggccagccgtgcccccgatcgtccgcttccagcccttggacccgacgacgtctgtccggtgaatctcgtcgtccatctcgggatccttctcgtcccatgcgagcgacgacgacggcgagttggcgaggagcgaattccgctgggcagagtttgattgcgagggcgagtacgaggcaaacgacgactcggagagagcagtcgaaaagcgggccgagggcgagtgcgacggctgaccgctgctgttgagcaacggctggaccgagtgcgagttgggcaccgacgagtgctggtacgtgtacgggcctagatgggggaaacgcgagcagaagcagaggacggaggagccccggtcagctcacgctcaacacacgagacccgcgcgccaaggccgacaggcaaaggttggtcccctcctggtcgatcccaacctaggccgcgacaccgaaggggcaagggaacaatgcaggaaggagaggaccgaccgtaggcactgccgatctcgcccctcgcgaggccgtcgaggacgcccgagctgccatgctcgccgcctccggaccggcgcgcgcgcgcgccctcggtcgacgactcttccgagttggagtaggatcctgccgacgtgctccgctggacgccctgctgctgattggtcgccgtcgtgggcgaccagcctgggttcaggggcgacggagccgcaggcgcaccgggtgccgactgcgagaagcctgccattgctcggaggccggcggggagggggaggagcgaggctggcggcggcggcggaggactgccaaaaaagacaagagggctggttgcgcggatggaagggggtagaccggtggctaagagggagcgtgggctgctgctgcttggcccgtcgttctctttgtcgtcggagggttggtgtggatggacggacgttgctgctgctgccttccaccgaaacgaagctgcagccggggcgggaggcgagcttgcagcacgggcgggcgcgcacgcgcgggggcaagttcgatggccgacgaccgtgaccaactgctgctccggggaacaaaccggacccttgaccgccctcactgccttcgaccagatcctgcaggagcgccagagctgaccatggggacacgagactgagccaggctgatcaaccgagctcacccaggacgaccgtcgtcgaccgaaaacgggcttgggcgagagctcgaccggccgcgcgcagcagcgacgacagaagccggccggcccgctcgacgccgctctgcgagccagcacaggccggtctggctcagattgaccaccaaggttgcccatcgacgcatcgacgacgggccgtcaacgcaggctgctgtgtacaggctgaaggagcgaaatgggccgcatacagccctcgtctatggcagccgggcgacctcgcgatgccctgcgacgcggtctggcagcgctcgcgaccacccctgaggtcagccaacgctgattcgacaagctaacccgattgcgcttgggccatcacactttgctgctgcccagctgggctcatcttcagtccgcttggatgccggcgacagctttgtcgtcgcaggtgaagggccacccggtaacccttcgtcgacgggcgatattctaaacgacccgcgccaccggttagtagtcagaggacaacgtaggaccctcttcatcttgttgatggtcgaagtgcagttgaagtgacggagggcagaagcctgccgttgacagaagcctagcccgcagcggacccttggcgtcgcgccttctgcgccggacgacctcagtctatgacacgacgacttcgcatccttctgacctttactcttcgtcctccgttttcaaggcagcacttgcgtcaggttgttgactgggtggattgcaagagcggagggcggtgtgttcgacggcggccgtcggccggccacgcttcgagacagcggtggctcgccccaggcctgttgcacacaccaactctaatcatgacgagggtccgtcccgtcggtctcgtcgtcgacggtgggcgaccctctgccctttgacgacctccctccgacactccacctcgacccttccttttgatacctccgaccgtccatctcgtctgctcgaccgaaacggtcgtctcggcggcgacctccgatctcgtctcgtccgcccgcagcctcgctcaacctcgagctctcagcccttgcgagctcaaccgtggtcgtctcctcagagctggctgcctgcccagacgttgcgtctccggtctgacctctccgattggacggtcgccagctccgtcctggacggcgccatgtcggctgctagtcgcaatcctctcgcagactccgtcgacccggctgcagcgctcagcgtcgcccacaagagcctcccttactttctcggcctgttcacgtcgtctgtccttgctcgaccgctcagcgccggactgggtgactcttaaactgacgccggaagcaatcctgccgctcaaccagctggacgcttcatggcgcgagcgtcgtccttgtgtgtcgatctgcacccgagggcgcagcgcctccgccagctgcaggccacctcgtgctgaaccgaccgacggccctccccgacagctgccaaactacctcttctcgttccggaagaatcctcttcgcgaacgcctctttatctgcggcctcgtcgcgctcaataccgtcgacgtcagcttcgacctgagcagggtgtgagtcggccgtttcgcgcgaacccctttcgacgccgacggctgacctcaacccgtcgtctcttctccgacagtattaagatctatgttgtagtgcgtcctgtctgcgacgtgctgctttggcttcgtcggctgacgagctcgacgtcgtctgccagcactttggcgacccctactacctgatttcgccccggctcaatttcgagaaccagttcctgtatttctcgtgcgttccaagtctcagcggttggcttcgctcttagggctcacatccaaacactcctctcgtttctagcccggttttcatcattctcatctgccaggcctatctcatccgcaagggcgccatcttcctccgctcagccggcggagcagcccaggcttggcggcatgccatctctgcgatgctgagcgcactcattgccgcctcagccgcttgcggctacgtctcgcaatacatcttctggggctacgacaactagtgcgtctgccgatctggcccctcgtagagcctcccagcttggcggctgacgggtccctccgggtgaccagcctcgaagcttgcgaagaggtcagcaagaccttccgaaacaggtacagcatcacgcacgtcctctggatgctgctcggtgctctggggatcaccggcatcgccgctgtgctcacgctcgagctcgcgcacacacgggtttgtccttgaccgtctgtcaaggggccctctcataactggaactgacccgacggtcttgtcaccttctccaggcctggcagcgccagacaacgcaggtagatctcaacgagcggcatccagcgagggcggatcgcatctatatcgccctgcgcaactgctccttcctcatgctgtgcgtcaacaagtttacgctctcgggcagcatcacctggacgctcatcactgattactgtgccgcttctccgtcctgcagcgtctctctcatctcgttcatcctcttcctgaccgagaacaaagtgtgcgttggcgtcgtgcctcacatctttgaagctgcccactgacatgactgctcgatggatcctcacagctggacctacgcgaccggtagcctactgccccgtctgtcagtacagattcctgtctcctgaagcagacaggcgccacccgactgacgcgtcttcgcacgccatcagctactcgatctcggtcatcgtctggacagctctgccgcggcctcggccgagcgcaccgtctcaggcagcgtccgagccgcctgatctttcgtggacacattctgacctgccgggcgagcgcaaggacccgagccgggtttggacgatgttctcgcgctcgcgcccgagcagcgcgagcagcctcgccgccagcggtgggggcttgcgccggcccgtgtcgttcctgcggcgcggtcggcgcgggcagacgcaacccaagcagtgggtgctcgacctcgaggcggacgacggtcagccggccgagaagatcgacttccagctcaatgatggcgagtcggtcgacctcgctggcgtgagaggcgccgatgaggacgaggcaatcgagctgcgacagtggcgcgagaacgtcaaggtcgttggccatacgagggcggtgagtgacgtcctgcgtgtcccaatcatagatggcgctcgagctgagcagcgcctgtctctcgccgcagtcattctcgtcggcctcgccctcggggacgcacgcccagctgagcacgctacgccagcggtcgtccgtctcgtccgagagccggtccggcggcgagggtggtcccggaccgctaccgcgatcggccgacgagggcagggaccgctgagaccgcagaggctttggctcgaagcagcgtgtattctgtctgattgatggacctgtgcgacctgcgggacggtctgttgggttttttaaaatcggcccgctttgccatcgcgcggccgggaggaccatcctttgggcagcagcgtcggatgagacgcccgtcacgaacccccctgacgatcctcctctcctttaaagtcgcctgccttttgcatggacgacccgtcgtccgccagccggacgccgagctatgcgccgccactccggtcgactgccggtagcacgggctcgtcggacggcgagccaccggcggcccacctccagcagcagcagcaaggcgggcagcagccggtgccccttcgtccggccagccggttggatcatggcggccctcctcctcctccgccgtcacaccacccgctcggcccgccatcgcgacccggctcggcctcgaggatggcgtcccacatgatccagccgccggcgctcgtctcggccagcagttcgggtagcagcaccgccggccagcgtcgggcctcgacgaccgccaggcctccaccagcggccgcctcgagctcgagcaggacggtagcaaacaagccaaagccgaagggcaagcctcgagcgccggccaagccaaagggcctcgcagctcggctcgccgccaacggcacgtcggacgaggacagcaggagtgagagcgacgacgacggccggcccgacggcaagaagaagcggaagcgggttgagcgtgcctgctgtccgttacctcctgccgacctgcctctctcacattccaactgaccatgtatctctcgcaccacctctcgcactaacagactcgtgccgtcagcggcgttccaaggtcggtcctcgaggttctcgcttggtgcctggctctgttcgctgctgaccctctcggccgccgcgcgtccgccctccccgcagtgcgacggcacgcagccttgcgccgtctgcgtccacgccaaggtcgaatgcagctacccgccgccgtcgcgtcgggtctcgatgaagtacgtccgaccttctttgcagccatgcttgcgctcttctctgaccccctcacttcgaactgctctcgcgcaggtatgttgaggtgagtcgggcctcgactggcacgcggaaatcccgccggctggcccgccttcggggcgtcatcggccgggccggccaaacattcattttcgtccctctccccctttttctgacgccgacctctaatttacaggaactcgagcgcaagcttcgcgacattgagaagggccaggcgccgggcgcgggcggctcgaagccggccgaggaccgcaagccttcgcagctgtcgacaacctcgacgaccgccggcagctcgagcacctttcacgcccctcaccccgaccagctgccgggcccgtctgtccttacggctggcagcctcccgtccatcacccggctcggctcgggcgagcaccatggcggttctccgctgccttacggctcgcagtgggccggaccgccccggccaggctttgacggcctcgcatactggccgacaggcagcccgcacatggcctcgtatccaccaccgcacatgcccggcggcagcgttggcggcggcgctcaccactttccgccgctcggcgacccgcatcgctaccctgcagcgccgccggccgggtccaacgcccgctgggagcaaaccccgctcgcgacgctcgccgacctgacgacgacccagacccagatacagcacccggccgtgcggccgccgccgcttcagagctcgctgccgagcttcaacggcggagcctgtcctccaggaccgccatcgcagcagcatcagcagcatcagcagcatcagcagcatcagcagcatcagcagcatcagcagcatcagcatcagggcttcgagccgtacccttacgcgacgcatcacatgccgcggcctcagccggttccggctcagcggccgacgtaccaggcgccaacgccgcagtacacgccgcccgagtcggaccagagcaagtcgcaaggcggccagggctcatctagccatggcagcacgtcggcttcggccagccagcgcccttcgaacgcgagcggcaccggccagtctggccctcgccagccggcgtcaccgccgagcaacgatgagtctggcgagccggccgacccggagcaggaggcgctcaagcccgtgttcgaggccgagcgctgggagcgcggcggaggcgacggaaaggcggccgactttgtcgagcgggccgctgcgcgctacacaggccgcgacctcgagataggcaaggcggccgagccgggccacaacatcgaccagtctgtcgtcgaggcgctcgccccttcgccctcctcggccgacatggtgcgtcctctcacctcagtctctcgcatcagctctgcgtgctgaccatttgcgctccttttccctcgctctcccaatcagttcgtcctgccgccgcgtgcggtgaccgatccgctcatcgactttttctacaaccgcgttcaaaatgtcttccccgtcctctcgtgggccgtcttccgccggcagtacgtcgacgccatttcgggcccggagccgcagggcggcacgcgcctcaaagcctcggagcagatcattcgcgcgaccgttaacctcgcgctcgcgatcgccgctgcgctccggtgcaaagcgggcgacgctgctatctcggccgacggcttccggcgggctcaggcgctcgtctcggtcagtcgctgtcgcagccatgccggtcgctgcgttccgcccgactgacgctgcttctcctcgtatggccttgtcgttcaggtgccgcacctacttctgatgggcaacctgccgatcatccagtacctgctgctgctctgctttcacagccagaggtccgtccgcccaggctaagaccgctgccagtcaaatggttgctgacggccgcctccggtgtcgcttgtgctcgcgcggcagctcctccaagggcaacctctcggcgaacgctgctggtttgtcccctctgccgttggttgccgcgtcgtccaagccgctgatgctgtcgcctctcccttcgttctttctcaggactcggcctgctgatggcccgcggcatccaactcaacagccgcgagatcaacgagacgtttgcggacaaggacactcgggtgcgcgagcgcgtctggttctgtgcgcttcagatggagacgtcgagctcggccatgctgttccgcctcgtcagtccgctttcacctctgccacggtcgactcgaggcgcacgctgacatttgctgcccttattgctcagacaacgacgaccgagcgcgacttcgacgtcctcgccccgccgagcgtcgtcgacgacgagggcaagctcctcgaggatccgctccggctcggcaacgacgaggcgcccaaggagctcggctactttcgcgagctctgctcgctcgtcgccatcaaggcgaagatcatccgctcgctgtacatggtccaaaaggccgactgctttcccgactcgaccgtcgtccttcagatcgaggagctcctcgtacgtcgcggccgaacacttggagcgggaagctgagctgactgtcactcggacctcgacaatccagctcgacttctgggagaaggtcccgaactacctcaagatcaagacggtgcccgacgtcccgctctaccggctccaggcccacctcctccgctgccgttacaataacacgcggatcatgctctaccggccattcctcttccacgtgcgtccttctccgtcgagcgtcctcactataggcaccagggaggctgcagctgacgcccagcctaacccttgccgtggctagttctgctcggccccgaatgggacgaacccggtcccagactcgctccggttcaacctcgcacgcaagtcggcccgagtctgcctcgactgtgccgttgagcaggtcgacctcgtcctctcgaaggccgaggagttcatgcagggctcgttctggcacgttcttctttgtcccgaggatcggcgttgttctggccgccagacgctgatcaccgcccttgctcgtgcacaggatcaacgtcggcttcctctacacgtcgagcctcgtcctgctcgctcatcggctcgttaatatggtctggccctcgcaagacaaggaagaggttgaggaccggaccgttcaggcgatccgcaaggtcatggactactttattgtgcgttcgccgtcgaccgagtcagggatgcggcgcccacctgaccgttgctttgatgcttgcagctcctcggctggtactcgaacgaaggcttccccgacggcgagtcgaaccgggtcatccccccgcccaacgtcatcaagacggcccgccgcgtgtaccgcatcgtccgaacgatcgacaaggtcatcaagcgcccggtcgaggctgtcgctgccgccgaggcggccggtgccaccatcgagtctgccccggacgagaaggcgtcgtctagcaagctgtcgcagcaggcggccgtcccgcccagccgttacgcgtcagtccctgagcacgccgagccgttacaactgctcgatctgatcgctggcgcccaaattatcttcgttcgcaggcgctaccctgacccgacgatcccgcctttgcacctcgctccgcccgagaacacgccattcagcgacgacgccttcatgtcgtcgtggatcgcccgttcgtcccgagattctctcgctgcttctcgagggcgtccgattgacccgttgcgtcatcctcttctcaccagtgatgcagcccagctaccgcgacggcgacatcatccctgtcgacttcaatcccccggtcacgcctttcgacctctcgcgccagaacctcggcaccaacgtagacggcgagtcaaattggcagggctgggagtcgcttctcgttcgtcccttcgcgagcttcctctctctcgtcggcggcggctcaggctgaccgcaatctctaccgctcgcatcgcagggtacgggctacctctccaacctcatgaacgagaccgagaacgatcacagcctctcgatctgaacaggtcgcacgcctcttgctcaccctcgccccgcaccgccgtggcctacctcttgtgcgccttcacgtcccaatccgcccgtcggtcgcggactgcattccgtagccgctcccatctgtattcatagtcgcacgcaccccctcctctcgcactcgtgacctatgcttccctgtatgatgccccgacttttttctgcgactcgcccggggcgccgggtcggggtgcggcggcgagcagcggggaaggaacgccgcgtagcccgacagacgcgtagagcgagcagagcccggagtcagccggttgggttcccttcaaacgacgacctctccacctcaacgatgatcagcggcattcagcatgtcaacttgacggtcggtgtcaaggatgaaggaagcgcacctctgctcaaggcggacaagttctacggcgagatccttggcctctgtgcggcttcccggcaggcttgtccaatggctgctgaaccgctgggctgatgacctgccgcccgacctcctcggcttcgacagcaaacgaccccgtaccaaagggcatggaggactcgctcaggtggttctcgttcggcagcaacggccagcaggtgcgctacctcgctcggccgcgattgtcgagacgctgacggccctcgctcggctccgctctgcgacctcaccctctcgcttcgaccgacggccgttcgtcgcgcctgccagattcacgtctcgctcgagcacactcgggctccgctcgagacgaagcccctcacccgcggtcatccgtgctttgtcctgccctttgagcgcctgacagaggtcatcgaccgactgaatgcgttcgcggcgagcggagacgcggccgcctgctccgaggtcatcgaggaccaggccggcattcctgaccccgccaatgcggccaacgtcgtcaacggccaccggaggggcgaccgcttttttgtccgcgacttcagcggcaatcggctcgagttctccggtatttaaatgcgcacgcgtctttgagcgagcgggcgggcatggtggacaacgacattgtacaaagtgagtctcgaagcgaagcagataatcctagccggcggtacccatgcccaagctgacgatcacgtacgtgttggcaacaacgacgaccccaaagatgaggtacccggcgccggccatcgcccaaccgttcttgaacgagacgacctcgggggcgacctcggcgcatgagtggtctgccggcccactgaggtcgccagcagcggcagcagccgcagcaccggccgggggcgggacgttgacgaccatgacgtttgacgacgtgatccagaccaaagggaagacgacaaacgggaggacgatcgagaggatgacctgggagacgacgaggagggtgtcgatgccggaccggccgacggcgatggcgacgatcatcgacggaaccatgccgatcagccgggtgacgagccggcggacgaggggcgacgttcgccactcaatgaagccttccggaacgccacccgcgcgtcagccgagacggcccatcattctcgcagacagagacagacgacgcaccttcactgacgacctggccggccaaggtgcacgagatgctggccgactggccgctacagagaagggcgatagcaaagaggagagccggcccgttgccgaggtactgcccgatcagccgatgggccgcaaagaggtcggcctcggccgcgtctggattctggtagaaggcggccgccgcgatgatgaggatcgccgagttgatggtgatggcaaaaccgatgagcgaaaagacaatgtcgaccgtcgcatggccgatgtgctggcggataaagtcgagccggttgaattcgacctcgtcgtcgtcttcgtcgtcgccgactgcttcggcctccggcgaggctggccaggcagacgatgggtcggccgcgctcgacaagcgcgacacgacgtcgatgtcacccgtttcctgctcgggtggctgcacaatcgagaggggaccggcgggatccttgaggtcccgtagctcgtgcaccgacgaggtgctgccactcttgacgccgccgtcaaacactgacgtctctcctctggccgaacctgctggcttggctcgccgccatgagccgggaagcatgctgaagatgtcgctgctcggcagtcgccacttgcgcagacttccggctcgagggggcggcggcgctggcactggaagcaggcccagccggtcgacggtggccaggcgggaaccgataaacagggcgtgcggcatgaccgtctgtttgcacacagcgagcccaatgatcagcggctgaacgagaaaatttccgagtcagcagcgtgaaggagccgcttaccgcgccgatgatgccgactgaggtgtagagggcgctgtgtgcggacgacagacacaatgtcagctgtgcgctacgcgagtgagcaaggactgggacgcacccaggcccaaagaccttctttgacgggacgtagcctaggaaggcctcgccccagtctggcccgaccttgatgacgaggacggcaaagcacgcaaagacggccaggacgaggccgacgatgatgagctcaaagccgagcatgccgcggcgagtcgtcggattgccttggaagaaggcgaggacgagcaggacgtcggctgacgtcaggaggacgcctgcccaaagcggcatgcgcgggaagagcaggttgagcgcgatagcgctgccgaggagttcggcaaggtcggtcctgaagccgcaaagcgagcacgcagcctatcagccagagggcgacgcggccgatcgagacgagatggacctacgcgatgatggcaatctcgacgaggacgtatatcgggtagagcacgccccagcggatgaggagcgtgtgccgcttgcagtcgtgcagcagcagccgggtctggcgcgcaaggtcgagcccactgacgatgccgagccgagtcgcctgcgtctggaggaggatcgcgccgatgctcgcgaggaggatgacaaagaggagcttgtagccctgttgtacgccgtcgacagggtcagcgagtgtgcgggcagcgctgagagggcaggggccgcaacgtattgagcgccggcttggaggtcgaccgaccagttgccgggatcgaagctgcagcaagtttagatagaccgtcagcaggaccgttgcgagcaggcccaaaagggcaagagtgggagaccgactaggagacggaagctgcagagagagcgacgaagcagaggtcgaagcgggtcagccctgctgcgcgcgtagtcgcccggaatagcccgccgcatcgcgacgcaccgacgatgccggggccgacaaacttggctggagaggacgggagggacgagaggggcagaacaagaggatgtcaactcgaggtctctcttgctggcaagggtgggtggacgcctgcgaagggagcaagcaaggggctcacagtgtcggacgagggcttcgccggtcgagcgcatcgtccgcgctgaccaggcccgccagcccggggcgggcagcgaagagtcaggcatgctgacagccagatgcagtcaagtcgttgtcgagagaggtgtcgcttcggctggcgcgcgtgctgagcgatgtttatgcttgtagaagcgggagcggagcgtctgcgtctgaggctcgagagctcgagcgatgcatcttctggagggagagctatctgctgatgcagcctgtcgggctcctcttctcgcgagaagcagcggcggcggccgcccaaagactcgatcgcaaggccagaaagtagggccagcaagcaggaggcgccttcccgactctcgtacgactgctcgatggagtgacaagcgtcggccggttagcttgggccgtgcgagtcgccgtcaacggccgccgacggaggccgttgctcgcgtcgggacgacgcgccgtgttgtgatcgcagacggtgttgcttcgcggcggaggaggaagaggcggtcggcggccgacggcctcgccggacaccgccgcgcggaggaagctcaagctcagcccccttcgccatccgaccagcgctgtcggcggccgctcgcctcggcctcgctctcaacccgaagagcctccggcagcctccgtgaaggatgttgtcgagggctggttgctcaactgacgatgaggcagtgcgaggtacctctgacgtcgttgctgcattgcgaaggctgggcgttacgatccgcactgtccatcgggctgtcgaccgagcgctggccgagggttggttctgctccactgagcgtgccggcgtgaagggaagacgtgactgcccaggctctggcgagagaccactctctgttgttgactttggccgcgggaaggaggccaaagtatgtgacgcgggcccttctgtcgttcaattcgaccggcgactgggcccttgcccgtttgagcgaggcctcttccaacagccaccgcacacgacgggcccgatggggtccgacgggctcgttccggaaggctgaccgcgctgacgagtcccgtctgggcaggtcaggccttggctcgacgccatcgacgcggcggccaccgccgccgacggctgacgatccccggtcgctcagcaggcgtccgactcggcgtgggcccgcgatcgaacaaccaacctcccctcgggatcggaaggtcggcaggccagtggaacgatgggagtgagcagggtataagagcgagccttcgagggcaatcaactctcttccccttccctcacccgcctgcccatctcacctcgccttctctcaacccaaccaaccacccaacccacctccctcaccatgctcgccaaccttgccctcgccgccctggccctcacccccgccgccctcgccgcccctgtcaagcgccaggacggaggcaacttcggcgtctcggaccccaacatcctcgtcctccagttcgccgccttcctcgagggttagtcgtcgcttttgttgtttttgagatgttgagttatccgccctatactgacccaactgtcttacctcttcccaacgcagcccttgaggacgcatactactcgcagggtctcaccgccttcaacgcctcgtcgctcgaggctggcggcttttcggccaacctctcggctgcggtcattgcccagctcaccgtcttcggcgaggacgagaagaagcactcggtcttcattgacagcgttcttaccggcgccggcctcgacatcttctacaagacctgcacgatcgacttctcgggcacgcttgacaccgtcctccagtacgccgcctatgcgcgcgccttcgagaagtgagactccttgctctaccttcctcatccggcatttccatttgctgaccacctccttcaaaccttgtctcattcagcatcggcgtcggtgcttacatcggtgccgctcctcttctcgacgactcgaccctcgtcctcgcttcgacgatcgccaccgtcgaggctcgccactcgtcgttccttaacctcatcaacggtggtgactactcgccctcgccgtacgacatctcgctcgctccctcggccgtcgccaccctcgtcctcccctacgtctcgggctgcgacatcggtgcctcgcttggcattatgcccggcacgcccctcaccgccaacattggcgctgacggcaaggttggcttccagatcaacggcgagacccagatcgagggatgggcccacatgatctggggcggtctctccgagtcggtcgtcgtcggtgctgagcaggctgccctccctgccgacatccccaacggccccgtttacatctacctctcgggctccgagaccccgatcgccaacaacgccgccaccgccgacctctcggccgtcttcgccggccccgcgctcgcctttgtcgacaacaaccccctgtcgctcctcgccgccctctaagcgacgatgcctcgattcgacctccttcgcctctccaaaccgatacatagttagctgaacaatcttgcccccattgcccctcactcacgccgcgtccctcgctggcctctctcaaacagactgtatatctagtagtgttcctcctaccatcccggtttgttcgttctcccttcataccgcactccacttcgcatgtaagaccgtccactcgactttttgtgcgccgccctcgagcgatctaatggcctttggccacccgatcccttgtttttcttccaaagcatcggtctctcgccgcctcttctgccgccactgtttgttctgactgtcgccgcccgggtggcgtcctcgcaagttgtcgggagcggtgatgcgggctgcgcaagcctcctggtgcaagcaagcgcgagccgccgcagcgatggacctgagacgactccctcgcccgcccacaagaagcctgcccagccggcctagcgagcttctgctccgcaactctcgcttgcttgccggctcccattcagcgacggatcggtcggtcgcgcctgacgcggtcacaaatggcggctcatcgcgccggcgcccagtcctcgtcaagtcaagtcaggcgcgcctcgcgctgccagaagtctaatcccgtcggacgatgtcgctcatttcgggatctctcgcagagacgggcgagcaggagaaaatacaagtacatgggcattaattacttctgcagacgttcttcgagctacaggacaggcgagaccaacggtacatagagaggggcgtcagcacctacagcggtcggagtcaagcctaaaacggtcctcgccgcaccttagcatttctccgctgcagctgctgcaactcgcgctggagcgaggcaatgacagcgtcccggtcggcgacctacaatcaagccaaggaaaaaggtggttagcgcgctgcggatgcgtgaggaattggaggagacgcacctttgcttcgagcgtctcctgaagcgatttcttgcgtgcccggaacgcgcgggcagagactttgtttctgtcggacagaagggtcggcgacgtcagcgtctgggtcgagcttgcgagcgcgagcgggcgagactgaccggatctgccgcttgcgagacggcgagagggcgttgtagctcgcgcggctcatgcgaagctcttcgaggacggcgtcgatcgtgacactagggaaggacggaacgatcatcagcctgaggagagctccgaagcgttttctgaaaagaaacgcaccccttctcggcgagctcgtctggcgtccgcgacgcctccgtctcgtcagcaagcgacgccgactccttgtccggcgcagacgccgccctgcgcttcgagcgcgccgccgtccgccggtggtcgtcgtcgtcgaccatcatcgtctcgtcgtgatcgtcgtcgtcatagtcgccttcgaccgcggtcggcccgttcgagacctcgtcctcgtcatcgtcgtcctcgccaacgccgtcgacgtcggagccaatcgagtcggacgccgagggcgagtcggtaatgacggcggaggacgggccgttataggccgtcgctggagggggaatggtcgacggcgcatagggcggctttatgaaggattgctgctgctgtagttgtgaatgctgctgctggtgcgttgctggccgttggtcgtggacagcgtgttgcgacaggtggtggaaggagccgagctggcgctcgatgtcttgaaggtttgagaaggcggcggcggcggcgtgatgatgaccgtgccgatggtggtggtgatggtggtcgtgtgacggtccggccgacggcagcgggtacgagtaggcctggcccgggtgtcgcggcggcggcggctggggtggcggctggtcgttgcggaaggcgcgcgatgccggcggagcggccggcaggctgaacgacgagacgagcgacgaggccgcgcgcgagaagggctccgagaggtgctggccgtgctgctgttggctgccgttggccgtcgtccgcgggccgggcgtcgtgccggcgaggctgtcgtaggccgacggcgtcggcgcctggtcgcccgagaaggcgcccgaggctgggtcgaacgcggccgggctgaaagagtaggttgggtaagagtgatataccggctcagagtaggccgtccggagcggcggtgggtcgtgcaggtagctgccgccgccgttggcgtcatgcgagtggtcgtcgtggtggtcggcagccggcgtcgtgctgctggctcccgcagcgccttgcgatcctgcaggcggcggaaggtcgtagacggcctgctggaaggcctggtacgactggtaggccatgcgcgtgggagggagaggtggtgaaagcgctggagttgtgcaagacggaaggaaggaagggcccgccgggctgagcaagcgtgtgtgcgagggcgtgtgccttcgtcggtcggtcaagagcgagagatggtggtggtggtggtcggaagtggcaaagcgttctctccctccgtcgctcggtttgtggcggctggtggcgcccggccggccgggcccgaccctccctcttggccgaagtgcaggtcgaggacaggacgctctcggcggccgtggctgccagcagagccgagcgcgcgggcgccgagagccggatgcttccctgcgcagcagggaaaggtggagggctgccgatcgatagcctcggcagccgacagtgcgcgcggctcccgggaagtccgaccctcgcctagcctcccctccgacacaacctgtgcagcgacgaggtggcaggacccgcgtagttgcagtcggctcgcctctacgctcgtcgcagctcgaagcagcagcaacagcagcagcagcagcagcaggcgttcgtccgttcgcgctgacttgcaggcctgactgatgagggcgcgccgatggctcggcagccgcaccaccaacttttttccactgcgcctgccttgctccaacggcgccgctcgcaccttctcgaaattccctcccagccagcgccgagcgctcacaagaaaatggccgagccttgcactttgccgcgagtcggcaaacgcggcgagcgcgcacgggtccgtctttaccggaaacctcccggctctgttgcgctgccactttcgcctcctccacctcgccgcttcggccgccgtcgcccctccgtcgccactcttgtcctgcccaacgggtgctttcgacatagagccccgcgctgactgaccgagatgggtacggccggatacatgagccgggctcccctggctgcacagtagtagtcaccacctctcgggatctccggcgacggaacgcttcgcattgcggaattgcgtccggctcgtccctcggtgcgcgtgcctggttcttggcccgccatgccgtagaactggctcacgaaggcacctgctagtcggcgatcccagaacgtctcgagggtgacagatactgttgtgtgctcgagcgaccgacagtctgtccacgccaccgatgcgaacgtatcctttgcgcctgcctgatgcgtttgtggccttgtacccagctcgataccatcttttgctcgcaagatgcaactaaaatggctcatgaagtcgagcaagaggggagggggtatgcgggatgtgcagggagataatcctagcgagtgggcagaggtcagttcgaagaaactcggacgttgtggcgcaatcgatctgaacgcactggtaaagatagggcggccccaagtgggcccaaagagacgaaggaacgtctttcgtcgtctgggacgatcttttactgcggctgcggcttctgactgttgcgcttgtgctcggccagggcggcgtccatctcgtccttctcgcgcttctcctcgtcgaggaccatcgcccacgagtggtcgacgtgcttctttgtctgcgcgagcgagagagcagtcgacgtcggggcggtcagccactaaaagagagcagacggtcaaatgaggatgaaacgaagactaaccggctcagccgtgctgtacaagaagccggcgccgaggatgagaagaatcgtcgcgccctgggcaatcatccgcgcctgaataatcttctgcgtcgtcgtctgcgtcttgtcacgccagacgtagccgaacgagccggccatggcggctgtacgagggagcgcaagtggtcgaggttagcctctgcgcatgcgagatgcttgcaggccatgaggggaacgcacctgcccaaccaacaccgagaacggctgtccggttgtccctgcgagaaaaggacaagcttctcatcagctctgcaacgcggatgccgagccgggccgacagaagccgtactttgaccactcgatcgcgcgctggctgagcgtcatctggtcccaccgagtggcctcgcgccgggccttctcctgctcaaccatgaggccggtgccggtccagagcgactggtcgtacttgaggccctcgttctcggcgccgatgacggtgccggcggcaaacatgatgatccagctgaggccgagcccgagcggaagcggcaggtcgtcaaagtcagcttctcaacgagcaaggcgacggctttttggttgctctgaagggagaagcaagctcagacgcacccggcggcctttagcgacggtggcagccgctggcggtagaaggtcgatgtcctcatggcgatcgagtgcaggccgaaccaggcggccgtcgacgaggcgccgtagacgagcgcgcccttgttggtcgcagcggcgtggccggcctcctcctctgcaaggcagttgatcgagtcatgtcatcagcggtcgttcggcgggctcagaggcggatgccggaggggttgcgcaccaggcgtcaggagctggcacattgcacgagagccgaaatggcgaggtccagtcagcaaaggcggcaagagcgacgaactcgtagccggtggggagtgctgaccttcatggtgagttggtaggagtgagtaagaggcggcgaggaaggagaggtggacgaggaggagaaggttgctgaggccggccggatgacgaggttgcagggatcgagatcgattagagtggaggcagggacgggcaagggggcgagtcgagacgtgtcaggatgccgaccggggacgggaagagacggcttgctctctgccacaacgacaggggtacggacgtctcgttcgttgtcaggtagactggaggaggtggtggatggcagcaagtcggtcgggcgggtggtccttccccgacttgaggaaggtgacggaagttgcgccagactcgcgagcggcatgtcagcttctcgcttcggccgggcactcgcgtccgtttcgacccgacccgcctctgtgcggcagacgaccgcctgcgaccattccgatacaagagacggaggcgctgaaaatgaactcatgcagagcagatgcaaacacggatgcggaccggccccgcgccggtccctccctccttccctcctgacccgtacgaggctcatgacgccgccgccttgtgctgctgcaggacctcgtcgccctggaccgtgccctttgcgttcttgcttgctgcaatggcagcgaggatttcgcccgcgccgccggcaatcaggccctcggctacctcgagcccgaccgcctcggcgtcatcggcgctcgcgagcgcccggtcggcgacggtaaagacaacgtgctcggatccgtcgaggctcgtcaccgtgcccgtcagggagagcgagccggcgtgtgcgctgccgctgccctctgcgctcggcgtaaacgttgagtcgacgccgacggggaccgagcagccgccctcgagcttgcggaggcacgcccgctcggcctttgtccgccactcggtcggccagtgaccaatttgccggacgagcgactcggtctcctcgtcgccggcgcgcgtctcgatgccgagcgcgccctggccgacggcgtagtggatctgcggagccgagatgagcgacgttgtccggtggccgaggttgatgcgctcgaggccggcgtgggcgaggatgagagccgtgtacggcgacgtcggcgcatcgagctttgccagccgcgtattcctgagagacggggtcaaacggtcaggctatggatctcaaacggtcggttgcgcaaggcgcaagtgagacgtacaggttgccacgctgcaaggaggagcacagcgagactcagtgttagccgaggagcagcagaggcgtacaatggggggcaggcagacgcacgacatccatgaacttgagttgcggaaacgctcgccggagctgggcgacacgccggaccgagctcgtgccgacgacgctcccctcaggcaggtcctcgagcgtcttgtacgtctcctcgagaccgcgcttcatgacgagcgcgtcgcgcggctcggcccgcttgaggatgcccgacagcttgaacgtcgggccgaggacggtcggaatgtccttcagcgagtggacaatcaggtcgaccgaccgctgcgtcagggccgcctcaagctccgacgtccaaaggtccttgccgccgagcaggtagagcgcctgcgacctgcggatgagcaacgatgcacgcgaccatcagcaatcgagcaagctacaaggcagactgtgagctcctgatgggtaggacgcactgattgatgtcgccggcagtgttcatcgtgatgatggggaacgagtaggccgggtagagcgcctggagggcgtcccggacgatgtgcgtctgaacgagggcgagctgggacgagcgcgagccgagggtgaaggtcgtcttggccggctggtagcaacgaacaatgatcagcagaccagaagcgtagcagatcgtccagcagtcatttccgccagctctgatcctttgacagcgaggctcgaacgatggagcggtcgggccaggggagaagtacgcaccgtcgagctgccgctgctctcctcctggatggccgacgagctcgagctcgccggctcgtcggcaaacacctcaggcttgagctcctgcgagagactcgatttgcggtggaccggagagagaggggttgacatggttgagaaaaaggtagaggatggacgggtcgaagtgcgaggcgaagacggcactcgtcggaagcgggctcgagctcgaaaacggccggatcgccgcgcagcaagagcgagagtcgtccggcgccatcggcaagctctcgctgcctgctgctcgagacgctcaatgccgtctgtgctggcttgtacgagcacaagatcgggacagttaagtttaactcgcagaatccgaacattagcgatctcggctggccttcagccgttcaagcgtcctccgcacgagagcatttgcgtcggtcatcggaaggcgagaatgatgacatcggtatcggcagctcaagccttcctccttggggacgatcctgcgattcggtcggcaaactgcgattcgaagacaggcgacgcgaggggctggtcagccgagggaaggcgggtcacgagagcgggcgcagaggacgcacgccgcggatgtagggcagcgagagcagggtgccgatgataggcagctggcggaggaacgacaggacggtcgggaagaagtcgctgcgacgggcggcgacgggcgggcggggggggtatcagcctctacatgacgagcgagatggtaggcagcgactgacgagcatcgaccaagccctgcgagaagacaagccagcgcgagactgccgacaaggcctgggagagcgaggagtgtaagtcgtcagtcgggcggaatcgagggtctggcagccggccgaactcacgggtatcggctcggggtgcgcaaagtcgtagatgattcggatgagcgagacggtgaagaggactatgtacgccaacgggaacgtgagcatcaggagcgatgcctgcgcgagagagagcgatcgatcagcatgccagtgtcgcggaaggggggacccaccagggccgactcaccttgcgattcatgaacttgctcatgctctcttgattccggccgtcgctcccagagccggtgcctgagccgacctcgccagagctgccctcgccgcgatgagccatcgaacccatgccggcggcgccgtcgtaatagtcgtagccgtctggcggggccgaacactcgagaatcttggcgagcgagtactcgacgccctcgtcgtcattcccatcatcatcggccctccggccgccttcctcgtagttgccgggcgagacgccgtcctcctggaagtcggacagcaaccgcttgatgccgacaaactcgacccccttgtccgaggcgcccgtcgcggccgagtcgcgccgcgtgtcggacgtcgtcgcgtttgacgtcgcggccgagctgctgtcgccgctcgagtcattcgtcaggatgattggcggcagctcggccggcagctgggcgagcggcgtccgcgggtcgatgccgctcccggtcgacgtgtttgagaagcggtgctggccgagacctgccggcaagtcatcctcgccgacctcctgttgcgaagagaggagtggcgcctggaccatcgtcccttgcaaggcgaacgggaagctcgaaaagccagccggcccgccgccgccgccgccgacggtcgatgagatgctctggccgggttcgggcccgccaaacgtctgcggcatctcgggcaaattcggcggtggtgtatgtgttcgcgcgttcgacggcgtgccggcgttcgacgacggaccgtcggcgaacgagaacgagacgtgcgaccctcgcctaagtgaggcaaaggggaagtcgagcagccggccgtcgctgccgccgccggcgctttcgccatccgagccctgagccgatggccggcgcgaggacggagcagcgaccggcggtagcggatttgccgctgccgcaccgggcgggtaggcgaacgacggcgtccgacgaagagaggtctgagccggcgggtccgggtgggggatcttgagcggtgcgagcgtcgacctcctcggcagctggctcggcgtcggcgcgtcgggggggttgatcatgtcctcgccctcgacgccgccaaacgactgcgaggcgcccatgccccacttccagcccgaggtcgacccccgcttcgtcgtcgtcatcgtccggggcgacaacggaggcgaaaagtcgccgctggcgtcgagacccttgctgtagtcgggcagctcgagcttctcccacacggggatgtcgcgcctcttcttcgcgggctcggccgtcggcggcggcgcggggctgctgagagcagagaaggagttccggccgtcctcgagctggatgtgcgtcgtcgcctgcggatcgttctgcggcttggccgtcggctggctgaccgacgtccggaccggaccaaggctaaggtcctttggcccaccggcgctcggctggcgctcggtccgcgactggcgctgctcgtttgagccgtccgaaccacgggcgccgcgcccggtgaagcccgcccagcgactcggctggtcgacgctgttgcggaagcccgagctcgaccggctgccaaagcgccagcggctccaacgtcggccgccggtcgcaacatcggtcgactggccgcccgtcatcgacgagccgctgccgccctggagcgaggtcgacgaccggatcttgtcgggccgccggagaaagacaaagagccggacgtagaggaccgagatgacgatgaagacgatgcagcgcggcaggaactgccagatttcggagaagaggcccgccttgtaaaagcagaggccgttgttatactggtttgatggcggcggcggaaggtgtcagtaggcttgagacagccgatcaggaaggcgagtgagaggaaggagcgacgtacgccccagtcgccctgggtgccccaggcgatgccgcagaggatgcaggcgagcacccacggtagcggaaagagccaccgccagtagcgttcgaggatgcgcgtcgccaagctgagcggatggatgagaatcaagaaggtcgagacgcagagcgtgagcgtgttgaggtgctggacgtagatagagacggcgagcaaaaagcccatcgagttgcagaagccggtgccctccctcggcgggttgccggtcagggtcgcgagcgtcgggatgacgccgatgacgccgagccagaagtcgccgaagacgagaaagaggaccatccggctccggacggtcgagcccttgcctgctgtgtactccttcatgagcatgctgaccatcatgccggccgctgaaggggaaagaggcgacgcgacgggggtcagcctgccagtagaggagagacatgagccgcgccaaggggaggtccagacgcaccgccaaccatggtgaggacaagaatgccaaacgagactgcgttggtgagcgtgccgagctttggcgtgtactcgccaatctcgtcggtgtcgaccgcaaaggccggatggacacgcgcccagaggcggagggcgaaaccgctgctggagctgctgccgctgccgccactgctgctggacgccatctgcttgttcgaggtggtcgacgacgagggccgaagagagctaccggcggaagcggcggcgacggcgacggcacgacctgtccctatctgctcgagtgcgccggggtcgacgaggagctaagggaggggagacggccgacgctggttcgaaagaagcagcagaggcggcggccgagcgtgcgtgctcaagcgagcaaggctcggagcagagagcttgtgttgcttggaaggaggccgaggcgccttacagagcccggtcggcggtaaggcgggctggacaagggacgcaggcggctgtcgttgttgccagtcgagttgaggggaagcggctggctcgcgacactgaatgctggttaggagggagtggaagaggaaggggaacccgttcggtcgggccgtgcttgcttcgctggctgtaaacgggggccggccgagcggtacgacggggtcttggatgggttggcggtggtgtgggctgtttgagaggttgcgttcaaagcggcggagcgtgcgggcgaacccacaggcggcgcgggcaggcggcgttggcagaggccctgggcgcacgggctgccttcgggcctggcgcacaactctttctctcgcgcccggctgacaccgcagatcgcactttaaaatcgactggcgctcggctcccctccttcctccctcttcctgctgaccctagccggccctgctctgcaacgcttgctctggcgatccacacccacgcttcaggttctcgatggcctgcgtccgacatccccgaccgagcagtcgtatcttcttggagccgagccgagccgcaaggttgcccagcagagagccgcgcatgacaggcaggatcgacaggtcggcgcaaagacacattaatacaaaagagccggcgtctgcagcccgcccggagaagtcggcccgctacttagcaccccttctggcagtagcagcaagcagagagggcagcaacagcaccttgcagtctacaagcgagcagcacggtcgaccagtttcgcttcctattattgttgctcgccctcctgctcgtaccgtacctctgcccgtgccatcatggcatgacgacggccgcgctctttcgccgccacgtggcgtcgttcacgagggcgatcgagacgcttgcgttcgacgctctcttccacgggcagcagcagcacccagcacccagcacggcgtcatcgctcccttctttcagcccagcacgccctctcgctccctccgaacgcgtcgcccgaccaccgcggaacgcccccttacagtcgtcttcgcatccgtgtcgattgatgtctgccgcccgcccgcttgccggcctggccggtgtcgcttgccgtgcaagccggtcgagcgagacggccggcctccctcggccggcagctcggcgagcgagccctgctctccgtcgtcgctgccagcaacctaactggcctcaatggtccttcccgagctcctcctccatcgcgttcgcaaccggctcgaccgctcgcctcaccagatccgagctcgctcgcgcttcccggcacttcacctcggtcccaacggcagccgagagccggacgctctcactcgagtcgaccgacccagacgtgatcgagcgccgggcgcagctgctcgaggaggtcaagcggatggacgagaagcggggcgagcaggtccgcctgagctgtgcgtttctttcccagctcgaacccgatccctgagagtgaggtgttgggctcaggctgacctcgatcggctgatgttccctccgagcagtcacgacgctgaacacgagaggtgcgtgagctcgcaagcggctttacaactgcacgatcagaggcgacagaggcgatgtcgcccatcgttacgtcaggacgacgacgttggccggcgaccactcaggcgcccgaccagcaagcagggctgcagctgactgactgacacttgcgcgcatccccccttcattccctcccaggcgaggtgaccgacccgcacctcaacatgaccaaggctgagatcgtctcgcgctccggcattcacgcgcgagacgtccgaccgctcgactcgaacaatgccctctcggccggcgtctaccacggccggcagaacctggtcgcgacgatcctgccgcggcgcaagcaatacattgtcgtgcgtctcgtcggcctgcgcgcttgcagaacctcagcactcacccctgtgctaccctctcatccgtcgccagctcaatcttctctacatccgggccctcatcttgccccaatcggtgctcatcttcgatagcgccgaggggcccgagtcaaagctgcacaaggtcatcatgaaccgcctgcaggtgcgcgagccttcttaccttctcttaacgagcctgcgtccttctcgcactgacgagccgcacctcctgatctcgcagcgtcacctcgaagagccgtccgaggagcccttcccattccgtgtgctcgagagctacttgctgtcgaccgccagcacgctcgaagcagaggtcaccctccttcgcggccaagtccagacgctgctctctgagctcgagcaggagatttcgcgcgacagcctcaagggcctgctctcactcggtcgggatctgaccggactcggcgaacgggcagggctcgtcaacgatgcggtcgaacgctgcctgaacgacggtgcgtcgtcccgcatgctgctctagctcgagacctttcagctgacgccgagagatgcgctctccccgcacagacgacgtcctaatccagtttgatctctccggctcgaatctcggcgcgaccgacctaggcgggatggacgacattgagcttctgctcgaggcgttctcgcagcggatcgaagaagtcatttccgaggtccagacgacgacggtgagcgccggcgctatgacctttgtgcgacttgaccgacgctgacagtcccgccgacgcctccttttggccttccttgcagagcaacgtcaactcgacgcaggagattgtcgagctctcgctgagtacgacgcgcaatgccctgctcgtgctcgacctcaagctgtcgctcatctcgctcggcatgggcgtcggcacgttcagcgccggcctatttggcatgaacctgacgtctggctacgaggagacgccgggcgccttttacctcgtcaccggcggcctctttgcgctctcagctgggcttgtcgttcttggcctacgcaagctcaagacgctccggaaggtcggcctcggtccggccgctcgcagccggtcaggcagagggatcgagaagggtcgctggttcaacttccgcgacgctggcgcgcataccgacggcggagccgtcctctgacggcagcaagtcaacccctagacgatggaaaagtaacgatctaatgagtcatgatgaaaattgaggcgtcgtgcggagcgggtccgggtgtgtgcaaggagagagagtcgtgcgagatttgtaggcgaagctgggattacgggcaggttatctaaggtagaggagggagtatgagcggagacgaatactgtgaggagatgaagggggagacgaaggggcgtcgaggttgagcccgaatttctcgagaaggagatattctatgagcctggccagcggaggcggaggccctcgagccagcgagcatagatggcgtcggcgacggggctctttgaccgctgctcgtccgtggctgccacggccgagatgacaggctcaggcttctgctgctcgtgctcggtagcttcggcagactggcccgccgagggacaccgaccgaggagcgtgaagggtgcgtctttggagtcgttgatctgccggcgaagcgcgtcgttcctggatggcaggcatcagcgaatgagacctatacccaagcaggagcagcagaacgcactcgtgcaggctggtcagaaggctgacaacaacttcgagcgcaagcgctggcgcggtccgcttcaggtcgtcgaagccgcgcgagatgagttcgaggccctcgagcgcctgaggcggaactgctgcagatgccgcggcctgcataatcaaatgacgcagcgtctgaggttcagcatggttgctggattagctaggaaagagagtgcttgaaggacgcacgcgctggatcgagggcgtgatgacctcgtcgacgagcgctcggccggccgaggcagatgccgtcgacgagtcctcctgagtcgagaggtctcccccggctgatgctgattcgagagctccatccgagccaggtggctcaggctgagctgcagagttggccgactcgctcgccttctcgacatgtttgatcggccgaagcgtgtctgcctggccgctaccggcattcggcgctggccgctcttgcgccggcacgagggccgagaagttgggctctggctgaggggggtcctccatcgccgactgatggaaggctgcgctcgttgtccacgccgacggcttgggctgagaaagagcagggcaactcggattgtcagccctcgatctcgctctcgcctcgactcgataagaaggacgtaccggcccgcgcagagtggagccgcgcacgctcgattcgctccaaagaagcgtccggccgtgaccgtcggccttgtcgtcgtcgtcgctctcgagatcctcgtcgcgcacgaccggcccgggcgacgaccgcctaatcgtccccaccgggcacgacccaccctcgtcatcgtccccgtcgccctcccctcccgctgcgaccgatgccgccgtgccaaagctccagtcagactgcatcgtctcgctcgagctgcttccgtcgagcgacttgtcgaggtcggcgaccgagggcaggacaaagccctgcgtctgctggccgccgcgctgggccgcacgagccttgtaaagctgatgccgctcgatgagctcggtcaggatcgtcgtccggccggctgacttgacaaagcggtgttgaaggagttccttggcgccaggacgctattcgagaggagaaggtggtagaggggatgacaggcaggcgacgtcagccgattgaacagaggcgacgctcgagcaagcaggagacgcaccgaggtcgtactcttcgtgagacagagggcgacaaattctttgaaggctggcgaaaagtcgccctcgagcacgggcggcgtcgccttcgggataaggaacaagacccgcatggctgcagcgtcgatatgcagtgtcagtcgaggagctcctggccaagcgggaccggacgcacggtggtactctgacaggggcggtacgccgagggcgagctcgatcgcggtgatgccgagcgaccagatgtcggccttgaagtcgtaggctgcctgtcggatcctgaaggggaaccggcgaagaggggcgagtcagctgcgaaagcgacagatgctcggaggcagaaggggagggacgaacacctcgggcgccatccttcgcgagcaaagcgagttggaaacggagaaaagtcagcgacagggtttgtatcggcaacttgaggtcgtggatgcaccaaaacggcgtgccgacaaaggtgtgccggcgcgacttgttgtcggttagctgagcagcgacgccaaagtcggctggcgagggcagcccatcgaagggaaggcgcaaaggaagagagtcagaactctgatctcggcaggtcatgaagcggcctgaacgggtgctcaccgagcttgacgtgcccgcccgcgctgagaaggacgttggccgccttaatgtcgcgatggatcttgtgctcgctgtggagatagtcgagcccttggaggagctcccggcatacgacggccgcatggcgctcggggaagacgccggccttcagcaggtcgtggcacgacccgccggcgagatactccatgacgatccagagcttgtagcccttcacgaaggacgcgaaatagcgcgtgatgtagtccgaatcgcactgggcgaggtgggcgatttcggcctggatctcggaaatgtcgtcgtcggagtgctcgaggtcgatctgcttgacggcgacgacctggcctgtctcgcggttcgtcctgcgcaggaaggggggttgaggtcgaggcggtcgagttagcgacctagctcgcagaaagagtggtagagggctcttggcaagccactccatcctgcgatcctcgataggagagccggccaggaatgacgcaaggaaggacgcacgccttatagacgacgccgaacgagccggtgccgagcttgtcgccgaggacgaacgcccgggctgggtcggtcgccggcggcagggcggaggcggacggagacatcgaggctgtctcgtatcgttgcctgccgttcttccgttaggtggcgagcgagacgggcagctggatgagagggggtacgagggtcgacgacgggcggccgagggggctcgagggtcgatgggcaaggctggctggcgagctggcgagctggaaacgagtagatcgagcttggtcggcggtggtcgtggtcggctgaggaaagaatctcgctcgcgcccctctctcttcgtctcaggctgcgtcggtggggatgacgtgaggctgacggccgccgaggtgtaagagaggggtcgagtgaaggggaggcgagctctgagaagtgctacgagaccccgaccttcggctcggaagatcaaaggcgccttggtgcggcttcgagttctctggatcctctttgcctgtaagaggccaagatggtgctcagacgagggccagggatggtcgttgatgtaggacgatagggaggctgagctccgtgcttgctgcgccgcctccttccgatgtgggcccagcctgggtttctggcattttcgacctgggttctaccctctgcccccccccccccctccgacctcgacgtgcacctccaggcttccgaacgagctcgataccgacgacttgcccccaactacgcatctttgcccgccatgcccacgatcgccgtcgacaaggccgagctctaccgccggcttgagaaggagtacagtcagtcgctcgcccggccgacgtccgctgagctctctacaaaggagctgatgaccctcccctccgttcctgcgcccgtccgtcctggccgctcgcagcccagaccgagttcgaccagctctgcttcgactttggcatcgagctcgatgaggacgtgcgtctcctcaccttgactcggctcaccttgggctgtgtagctcgaagcttcgaggtcagacgaggctcaaggagctgatacaccgacccttcgccctcttgccctgccctgcttcgtcgtggatccgtttccggccgacaccctaacccatcctgtgcgacaaacggacacctgttcgcctgctgtcctcattcccgtgacgatcgcagaccacggccgaggtcgaggctgccaagaaggccggccagccgaccgaggagcccgttcgttctcctgctcttgccctcggcgacggccgctctggcgcaagcctcgagctgccgagcaagccgagcgatagctgacgtccttttgcatgcctctacgcgtgtcggtcctgcaggtcctgaagatcgagatcccggccaaccggtgcgtgtcctgcctcgtccgagtctgccgtcaacctcgcagaaggatctcatgcgaacgacccgggctgacccctctgcttccgtcgcggccttctcccccaggtacgacctgctgtgtatcgagggtctcgctcgggcgctccgcatattcctctcgctccagtcgccgccggcgtacgccctctcgtcgcccgtcggcggcatgcttgaggtcaacgtcgccgcctcggtcaacccgatccggccttactttgccgccgccatcctccgactcaaggagcctttaaccgaggcggcctacaagagcttcctcgacctccaggacaagctgcatgccaacctctgccgcaaccgcaagtttgtcgccatcggcacgcacgacctcgactcgatcaccgcccccttccggtacgaggcgcgccctccgaaggacatcaagtttgcgccgctcaacaaggacacagagcacacggccgaggatctcatgaccatctacgaggtgcgtgctcgctcttgaggtgcaagccggtcgcgtcgtcccgcgcgacgagccctggtccagctcccttggcagctgtagccgtgcctaaccgttcgagcttcgccttgtagaccgaccggcacctcgccaaattcctgccgatcatccgcgactcgcccgtctaccccattatctacgatgcggacgaccgcgtcctgtcgatgcccccgatcatcaactctgagcgtcggtcccaccctgcgctgcgctacgctgcgctcgtcaactgaagccctctttctctggccttccgcagactccaagattgggccgggcaccaagaacatcttcattgacatggctggcgccgactcgaccaagctgtgcgtgacggcggcgtcgaaacgcagctcgtttgacgcgtactttcgctgacccgcgcgcaccttgcttccgacagcgacattgttgcctgcatcatgtcgaccatgttctccgagtatgccgagacgccgtacgtcattgagccggtccggatcaactttgccgacggcacctcgcgcgtaacaccggatctcgccccccggcggacgacggcctcggtcgagtacatcaactcggtcacgggcttcgcgccggtgctgccaagtgcccaggtcgccgacctcctcatccgcatgtcgctcggcgcgaccgtctcggccgaggacagcgacgtcctgctcgttgacgttccgccgacgcggcccgacatcctgcatgagtgcgacattatggaggacgccgccgtcgcctatggcttcaacaacattgcaaagacgttcccccgggcgatcaccgtcggcgcgcccttgccgctcaacaagctggccgacattgtccgcaaggagtgcgcccaagccggctgggtcgaggtcctgccctacatcctctgcgcccacgccgagaattttgtctggctcaaccggcccgacccgggcaacctcgccatcgcgctcgccaacccgaagacggtcgagtatcaggtcgtgcggacgagcctcctccccggcctactcaagacgcttcgcgagaacaagaagctgccgctgcccgtccgcatctttgaggtctcggacgtcgccgtccaggacgcgagccaggagcgcaaggctcggaatatgcgcaaagtcgccggtctctggtgcaacaagacggccggctttgaggtcgtccacggcctgctcgaccgcatcatgcagatcctcggcattaccttcatcgagcgcaaggagagcacggccgccaccggctactacatccaggagacgaccagtacgtacattctgacggtctggagagcggcactgagcgcgatcactgatatcccccccgacgtcctctctagacgccacctttttccctggccgcgtcgcctcgatcttttaccggctgcctccggccgtctcgcacccctctccgccgcaggaccacctcgacccggatccggcggccgtgccggcaacgagctcgaccggtggcggcgcgctcgagacgatgaaggagacgctcgccaaggcgctgcccgccctggcaggaaaggccaccggaggcgacctcgagatcggtgtcctcggcatcctgcatccggaagtgctcgccaagtttgagattgactacccgtgctcgagcatcgaattcgacttgcagcctttcctctagccgattgatgcatccgtttccgaagcagcgctttgtcgagcgaggcaggcgggaaggacgacaataggctgacttgggccagtaggctgccgggcgaaagaaacctcagccgagcttccggcttgggagctcgtccatcccgcgacgttcagccctggccaggtctcgctgcctttcactcatcaagcagccgtctcgcaacaacagtgactgatcactgtcctgctaacccccaacctcggcatcgcttctggcgctgatccgcatcttacatggaggccctgagcgaacggcaaggccaggtctgggggaaggaagatttcatggggtatcaaaagcagagggccgacgtgcgcgccgctcgtgggtatcggtaatctgcaaggggtctgacgtctcagggcgacgacgatgccggctgcgtcgtcgattgtggcagcaagtagaccaccggacgaccctggcgcgatgcttcaagggcctcctccttagtcttggagtgtcgcgagagctcgcgcagagcgaggaccgacttgcccggcggagggaagacaacatgtggcggcgaagcacggacgagcggcaagggataggcgaccttgtgagcgacactggagggtttgccggcggccttggccttaaggcgtttggcctcgagcgccgcctgcgcctcacggagcgtcgcccgacgccaggcaaagctcgcaaactcgccctcggcgtcgttgacctcggcctcccagcgctggcggaagagcttctgcatctcctcctgggttttgccggtcggcagcggcttgccgctcttagccaggaccccagcctcattctttagaaggcggagggtcttgcgtgcggcggcagacgcctcttcaggacagcgccggatggtcgcctcgatgttccctgcgagaaggttcagcgcgaaacaggtcagctcaagatcgagagagcctcgctgcgagagcttgcacgcacagctgtcgctatcgctcaagttcgggagcttccgctcgatcggcgagcccctgatggtgctctgaacattgacgcgcagctcgacggtcggcatcttgtttgcgggcaggtcatcgcgcatgggctggacgacgacgaccatctcgccggccggccgctcgatcgtctgcatgatgatgttgaggctctgatgaaacattgggcggcggttagtcggccgacgcaggtctcagagcgccgggagcaggccggaaacgcacctccttggggtaaatgtcggtcgcgtgctcaaagatgcgctcgagcaagttgacactgaggccaaagctgcggtcgccggttccggcagagccgtagacgaccttgtccatcgtctcgagcggaatgtattcgaagccctggaggtagcgggtcgagtggtaggcgcagaaaatgccgtccatgccgccgatgcgacattgcaggctgcaagcgtggcggggggggcgggctcgggtcagcgtgcgagaaggcgccggtgtcgatcgacatccgcagtcacgcacccgtacttgaggtaggcagagcgcatcatgtcgtagcgctcgcgctcgaacgatggccccagaccggtcagcgaagacaactggtagtgctggccttcctgtgaagttgttgggtccgatgagaaagagcgccggtcagcatcgagaagacttggctccagagacgcccgggtgaaacggacctcgtgattctcaatgtcgaagcggacgctcgccgtcgcccgcgtcttgacgtcaaagatgccgctccccggcagtcgctcatcatggccgtcgagctgcgaacgcatgagaagggagcggccctgtgcgaaaggcaggccggaggtcgtcagtctgtggtccgcgcggacagacgtcgcggccgcgtctcgctcgtaccttggtgtagttgtaggcttcgcgcgccgtccgctcctcctgggtaacgccctcggccgatgcgctcttacggaagcggtcgaggtcctcgaccgaggtagtgagcatcttctccataaccttgccctgtagagtcgccaagggtgagccgggtcagtcgcgcataaagagctcgaggaggccggagcacgcacgaggttggagaggatgcgctgctggcccggcggctgactagacttgtcgttgtcgacgccgtacatgtcgcgtgcagcgtcgtagcgaagatggatcgccgccggtccttttgtcccgtaagtgaacgtcgccggctgcagaaggggaaagatgcaaccggtcagcgacgctcatctggcctaagaagacgtcttgagctctaacctgggtttgccagtcgccggtgagactcgtcaagtcgaggcgcttccagccactaattaggaaccagatctgggcgagtgacgaggtcagggtcgaggtggagccaaaaaagcggcacttgtgctcctcggccagctgagcgaggtcctgcccaatggcggggaatgacgggaaggtatcagaagaaggccgacgcaaagaggacggcagtacggaccgtgtctttgctcgcagtcacgtaagcggggaatcgcttcaggtcgatctcgtccgggtgcggcagaatccgaaggcgctcgtcaaagttgaagacgtctgtctgcgggtcgcgcatcaggtggacgcctgggctgcacagacgaagggcaatgtgtcagcgccctcccagcgaatgtcgagcggcctcgatagagcgaacttgaagagtgcccggtcgagcgagtgtgccagacgggccacaggcggtctttccgtttcgggcttgacgactgattgtagacggaagccaccagcgtcagcagacggtgacgcaaacgaggtggtcgacacgcaccctcgaggtccttgtgcgcctgggtgccgtcgacccgtcccgaccagagcgtctgcatgtccttggccttctcgaggccgagcctgtcggaagctcgcagaggccgagactccttggcagctgagcagcccgcgcgaggtttgtcatcagcctcgcaaagcgaaacgcgcccaaagggcaaactcaccattaaatggtcggacgatgtgctgaccctggacgacccctcctgagctcttagaccgagaccgttgctcgagggtggcgggactgagggcagagttgccgtcgctggcgcgcgaccggtgaggcgcgctcattttgacccgagcccattgaggggagaagtgcagttctgcctggggccgagcggccgagtgggttgcaggctcgacaggcgtcaactttgatgctgacttgaccatggcgagcttgcgccggctcctgcccgctgacagcgatgtcgtcgacgagccctcgtccgacgcgaccggtctgttctcgttgacggccgcaacctcctcttctgaaccggtagtagcggacagatcggcatcttcggtggccttgagctccagctccgcgaggcgctgtgccttgatcagggtcttatgtctggccttgcggaccgctttgagtgatggttggggtgatggtggctcgatcagatggacgaagctgacggccgggcctatgaggaggctgggcttcgtggccggggccttcagaaagacgggcttcttggccgggccctggaggagttcgaccttcgcgcgacgtacgcgtgccggcggcttaacagacttggccgccgacgccgagacgttgacatggactgccggcggcagccgtagctcggacttaagagcagcggccctagctgaccgcgcggactccgcgcccgcggtcttattctcgggataggcgtattgaaggacgcccgtcaaagtggccggcgtcgcgactgagaacgtcggacgttgagcagccggcgagggaggtgcggcaaactggaattttgagagacggacggccatgatggcggaggctgagggatgaagattcgaccaagacgaggtcagctcgaagcttggatgaggcaagcaagcaggacgcaaggcaaggaaggcagaggaggcttcgacgaagggtgctgagcacccgaggcgcagcgacgcccgtaagccgggccctgagagcagctcgtgccgcttgcaggcgagcaagtgttgttacgaccaggacgagcgtacctttgtcgacctcggggactgaggtcttcgatgcgcccgatgaggccgctgcttcgagcttccgaagcctcacctgtgcggcgtgcgacccttcagcgcggcggccggccgaggtggcaaacgcctgctcgccggcaggcgctcgtcgggcggtggtcgacgcggcaggccgacgcgctagagagagcatgctggcctgccagatgggaggagccacggcgaacgagcctggacaggaatcggaggaaggcgggctgagcaggtcgaaggtagctagtcagaaagcgctctcgatcagagggcggagcggggccgcgcagcagtgccgggtcccaaattcgcctctgtctgaacggcatgcttcatcgcgacagctgaagcaggcatgttcacggcagaaagtggacaagcatttacaggtcaaagcccagcccgacgcctgccgcagccccgacggcgctcgcacggccctcgagcagaccgaagaggttctccttcccgagctccggccggccccgcgcgcgctcggccttgacggtcgagggtgaaaggacaaacgcctggacatcgctcaggactgccggtcctggccagacccgctgcggcgtcgttccaagcgccggacggcgggacgaactcggtgtcggcggtgcgctcgcgctcgggcggctggggtcaggcgacgtcgccggggtcgagacgggcgagcccgagttccacgaggctgtcagcgagggcgagggtgccggcgggaggatcggaagaagcggcgaaggatgctcggtcgctgagccagccgtcgacgaagtcgctgacgggccgcgcgtcggcagcgagggcgcggcgccgaagcctcgtttcggtagcggaagcgggtcgaagaacgacggctgaagactgtttcgcgctttggcgcctccggcagtggcgagcgtgacctcggctggagttgaagatctggccggccgcccctcgagcgccaccctagacctccgcaggccgggcgagctcgtcgcagggacggccgacgaggcccgccgcccgctggaagggacgtaggccggcggaagcatcagcccgttcgccctcggctcaatgacggacgctttggccgtcctgccagagccgggcacgagcgtcgtcggctggacagagtggcggggcgtcgacggtggcagtcccgctcgggccgcagagggagcagccgcggacggcaggtggggccggtcggcgaggccgtcatcgtccagccggtagcggcttggcgtccgagccggctcgccggaagaagggccctgagcatggacgggtgccttctgcggcgtctggaggaaagcctcaaggaggacctggcgctcgcgcgcacggccagacacgctgggtccagcgcccgcagcagaggctgccgatgacgatgagggcgatcttgtcgggtgatcgaactggtccgagtctgacgagtagtacctcgaggctgccgtcggagtcctcggtggttccggtgtaggagcggcgagcgtccttcgctcgagcagcgcggcagagggggaggacacagtcgggatggcggctgccgaccgagcgcatgacggcgacgatcgctcggccgagctcaggggaggccgagcggaaggtcgatggactggatgcgaggcgacggcagagaccgagagtgagggtgtcgcgcgcgcacgcgagatgagagcaacgagctcggcgtcctgggcctctgcccttactcgatgacggtccctcggcgcttcggccgatgacacagccgtagtcggattgggcacagtcgtccctctcgacctcggtggtcggatgtcttcaaagtcgggcccgcccgcggtggacgaggcagccgaggacggccgttcgagggccaccgagacgcggtcggcagccgcctcttgtctggtttgacttttgaggatcgacgatagaccagaggcagcactctcggcccgcagatagaaggctcggctgggagaactgacgtctgtcgacgggaattggccggctgggggtttactgggcgaggtaggtgacgccagagagggcgaggtcggcgtccgccggccgtgctcctcgtatctcggactacggacttgtgacggcgggaggagtggtgaggggccgctggccgctgcggccgccggatcgggtgaggcgccatcgatgccgcctccacggtcgcgtcctgcgacaacggcggacaaagcggccgaggacggtagcagggcggcgagtgaggcggcggccgttggatctccctctgagccttcaggcaagaggtaaaagaggaggaactcgaggcacttcatcctgtgggtcgggcggcggggcagggacgacagctgggtcgtcagcgtccgggcagcaatgcaggcgagtcagaccccaagctacgcaccggacctctttgacgacgctcttgctcttgaggaccttgcgaacaatctcgagcccgcctgctcgctcaaagacgcgcacgccgtccggcgcgtcgacgagaacggcgaagagcacgtcaagcaggacggccgccagtggcgggggcggcggtggcttggcctttgctgaagtagcggagccatcggctggcgtgccgttcggagctgatgatccgaccgcgcctgacgaggggatgtgcctggtcagaaggaggaggtcgagcaacatctgtggcaggccgaccaagacgggcacgtcagcgggggccgtaggcatcacaggcagttcgccagatcgcggagggcctgacctccatactcgaccgggtgctgccgacgagcgccttggttggcagatggacgaggctcaggccctggatgacaaggaagattgccgagagctcggccgcggtcgtctcgacctcgtcgacgggagctagggagggagggagggaggggcggccgcgcgtcagcccaagcctttgctaggcccgctgtcgctcaagttggcaagcatgcgcaccatgcgtgagaagctggccatgcaggacgggtaggagacgtgctgcgagtggcgtcaggcgcgagacgactagaggagcagccccggtcggatggtcagcactcagccagacgcgcagagacgcgacgacgcccgcgaggcgagagcccctgacgacgcacctgacgtagcgacatcgttctggagctcgacaaagcgtccagcgattcgctcgcgctcctccttcgcctgcgaatactcctgagctgggggcaggaagagggtggcgagcaggccgtcgaccgctcggagggcgcgcaggcggcgggcggtcgatgagcgaagggaggccagctggcaacaggccaagggtgccacagtcagtcgagatggcgaactacgtatcgtatacgagaggacggcgacgtacgtcctcgagcacgggtgccaagaaggccggcaggtcgctcatccaagccgtcaggagggggatgtggcagaggggaaggacgcgtccgggctgctgcctctgccgcgggacgagctggcctcgccggctctcccctccgacaaaccttcgtccgaatctcttcaatcctcaaccctcttcactcgagctttccgcctgcatatggctcgcggaagctacgcgcctctcgccactgcacctacgactgccgacaaccgagcacgagcagcatcgccttccaacacctccgcagcacacgtcgccgctcagcccgcaacccggccgtcacctcgagctggctcgagcctgcagtcgttcggccagcagccatcacccactccagcccgccgccggaccttcctcctccttttcgccctcgccaccgtcttggccgcttcggccttccttcgaagctccagcctccgcccgttctccctcgaccgaccccccgccgcccgcccagcagacgctgtgatgagcgccctcagccagaccgccggcaagcgaagcgtcggctagtgcgtctttcaggccaggcgggctgaccttcgcaacttcaccctcttggctgactgccgactcttttcctccgcacttgcagctttgtcaactggtgagccaccgtccgacgtctctcgcgacaggaggggcgtcatccgcaaaagcgcgcagcacgggaggaaagctaacgaccctactggccttattctcgtgcccgcgtcctaggggcatctacgatcggaaatgtacaactggcatagcccgtgctctgacttcccttggtcaaaagctcgaggctgacccaagcgacgtgcctgacgctgcctcccgctcatagacctgccgcagcagatcccggccgagcagctgacgcacgtcctctactcgttcgccaacgtcaagcccgaggacgggaccgtcttcctgaccgactcttgggccgaccaggaaatccactgggacggtgacagctggtccgttggcgtggtcgaagaggtcgtgaggtaggggcgggcgcagacgctgacttccgcctcctcttccccaggaacgacaccggcaccaacctctacggctgcctcaagcagctcaacctgctcaaaaagaagcaccggcacttgcgagtcctcctctcgattggtggctggaccttctcggccaactttgtcagcctcggccggtcggccgctcaccggcaggcgtttgcgcgctcggctgtccagctcgtcgaggactatggctttgatgggctcgatatcgacgtgagtctgccgagcgatagaaggcagtgtgagccctactctttgactcctgacgctgatcccttctttccctctcacctttccttcctggccgtctcgctcagtgggagtacccgaagaacgcgaccgaagcgcaggcctacaccgaactcctgcgcgaggtccgagaggagctcgatcggcatgaggctcgaccagatggctcgcgcgcgtgctttgagctgacggtgcgaccttacaggtcctgccgattctcggcctcgccagggctgacctgccccctgctccgccgcacagatcgccgcgccctgcggctcagacacgtacaagctgctcgacattgccggcatggaccgctacctgtccttctggaacctgatggcttacgactttgctggctcgtggtcggccttgaccgcgcaccaggcccagctctttgggcccacagacgagccctcggtcgaccaggccgttcagtggtaccgctcgcgcggcgtccggccagacaagctcgttgtcggtcaggccgcttcctggtgccaaagaacttcaccggcgctcgctgaccctcctttctcgcccgttcctcaggcatgccgctctacggccggagctttgcgcagacgaacggcggcatcggccagccttttcacggcgtcggggaggggacctgggaggccgtgagtctctgctgatgactggccctgattccccttctggcctcggctgacctttctcgcctacatgcagggcatgctcgactaccgcgcgctccccaagcagggcgccgccattggtgaggatcttggccgcggcgccggatggtcgtacgacgcgtgcgtagcgcgcagccttcgcggatgggcttcggccgtgtaacgttgacgctggaagcttctccctgaccgcagagccaagcgggagtgggtctcgttcgacacgcccaacgtcgtcgcgaccaaggctcgctacgttcgcgaccagggtctcggcggagccatgttttgggagctggacgcagtgcgtctcctctgtctgccagcctgtctccctctcattgctgacgaccttgtttggctgacctctactttgtaggaccttcgacctgaggacaagcttgcggcgcacgccctcgtcccgatcgtcgtcagcgagatgggcggcatctctttcggtggaccgccggccaactgcctctcgtacggcaactccaagtttgacaaccttcgcgacggcctgtagagagtcaagcgcaacgcccaaaggcatgaggataagttgctcgtcattgacttgcgatcatagatgcggcttgtggtctcgttcccggctttgagggggatctgcgagccagccgagcggttagacgatgcgctgaggtcagccttggagggtatgagcgtgcaccgccgcagacccagaagcccccttcccattcctcccttcccccctctcgactgctcgtcctcagagcgacggactttctcctatcatgcagaggggaaagaactcgggcacgcgtacttgctggcggcgttcacccgccgcagagccacgacttgaccgacgaccagaccaaagtcgacggcacagccggcggtgacggcgaccgctcacgctgacgctcatcgtcgacagtgagacagtgaggctcgggccgtacacagggcggtcttgctgccagacgctgatgacgtcagcctcttgacttctcagcagggctcaagacgtcgagcgcaccaatctctgtcaccgagtgggtcgccctgtcgccgggtgcgtcagtcagtcggatgcatagctccttccgagcggcctgtcagtgagccagcgtagccggcggacgacactctgaccagaccgtgcccggtgacttgcgacggaggacgttcgagagaccagccgtttgagaggacgggcgaaggcggacggtagcgcggctggccgtacgactcgggcgagcgcgactgccagtcgacgaaattaacgccgaaagggggtccagccgcaattgacgtgtcgcgaggcagcgtttgctgatcgacctcgtcctcgaccaagcgaggccgcttgacgacagagctccttgcgtcctgcccgtagggcgtcgtccgcttcgcatgagctcccggcgccgcgccaggctcattcacgagcagccggctactgacaggcggcgcgttcgtgtgagcgacggtcgagcgagtcgggccggcgaagctggaggcagtgggctgcgaccatcgcgagagatgcaggtagtcgtagtcgtcggcttcgtcgtccagccctccggtaaacgtcgtctgcgttggcaggaggggctgctgactcaggtcagcgtctgcttcggtcgacaccagcgccacaagagaaatccactgaagctggtcggcgcctaccacggagagccactgagggcgacgggccccgtccagccacagcaggtgcgaatttggagagcgagcgccgagcgttcgacgaatggaagagttgatggtcgcgaaacaatcgagctagtcgggcaagggcgcttgccgtcgtcactctcctcgtcgtcgctccgaccgacactgctgaggtcgttcgcgagtcgtcctcgaggtagctcgcaaagtcgttcggcttagcactggttgcggcgagcgcaccggccatcgtgcttagctggaagacggcggcagctagaagccgttgaaagggacgggagacgtcagccggctgattgacaacgctgggctggaggcgaagggcctcaccgacgttgccgttccactctgcgcggtcagagcagggctaccgaaactgccattcggccggaaagttgcacgcacgacgggccatgcaagtcgcccttgagtgtgcgccgcctgagcaagtgcacagttgacgacgtgctcggtaaactttaagatgtcgcgccgcctctttccgtcaccggtcgggcacatgaagacgccgttctcggagcggtagaccttgtacgcgtcttgacaagaggtagtcgcatcagtctggtcctcgagggcgcgcaatcacggcaaacgggtcgactcaccgtctcccatgttgccaaagcagagcatgacaaacggccaatgcgtgcgcatgacatgctgtttgagggccctcggggtctcgaacgtcacctcgtagctgtcctgctcacagtatatcggctctctgcggcctttccgcaccggcgaggcaagcggcgatggatccgacgaagaggaactgtcattgtccgcagcagcctcgaaggtagctatcgtccggcgcgtagtcacgccgacaggcggaggataggctgacggcaggaagagacaccgtccttgcagtcagtctcgtgcacgtgggagtgagatgcgagggttgagccgcgcgcgtacctccgtcgtcgtcgctgccctcttcgacctccgaggccgacttggctggctctccagtctgccggagcttgccgtcaggtcgaggtggcggaggctggacgacgcgccaagcaaagtcagactggtcggcagcgtcgacgatttaggagcacgtcatatacgcctgagcgttatgggggtcgacgtgcgcccagatgcacaggggtgacgagcagtggaagaggccgtcggcggcccgagcgatctcatagactgcgggagggagtcaaggggcgtgtcaacgccagtagaggtgctttgactgagtcggaggtgaagggcaggctgaccattcttgccgcgctctccgtcgaacctgcagtgcaggacggagaagtgggctcgtcgctcgtgtatggaacggctcctgccgtcggtcaacctaaggtcgcacatggtgcacacgagcatcagtacgccgactatgggactggaggcgctggtctgtcgggcaataaggggagctggcgaggttgatggatgagaggaaggtcgctcgagcggcaggacgaagggccggccggccgccggcggaaaaggggcccgcgcgcgcgacgctcggacccctttgatgcgacctgtcagcgccgtcagcagaacacgcctcgctcgctcctccgctcccagaatgcctcggcgttctctccttcgcgctctgcgtctgaaactctgctgttactatctcatgtgcatcagtgcggcgcttgacgccggtggacgacctagcgcgccgcaatatcgctagcttatcaggtcgctgcgtgccgacgatgctgaacgttctcctcacatcggtcgcgagagttaatgcccataagaaagcggccaaggtagcagaagagcgaagccgtggcagggcaaatgcaggtagcaacatatccacacttaggaccggcaaaaaatcaccgcttccggaatcgaaccggagacctgaggcgaacaagtggaaacattacaagcctacgctctgccaactgagctaagcggtgtagatgttcgcttgctttcattttaagtatattattgtgttttgttataccttctgatgttggcgcctttcttctgcttgctctcttgttctcagtcggtcggccagtcgcacgagggtacgtcgcggctgctctcctttagctgaaggtatgctgaccgctgcatgtgcgctctctcggcaaggcccgcccgactgcagcctggtcgctcgacgcgctcctgatctgcccctccccgccttctcccttcttgcgcatgaccgtctgtgtagcctatctgccccgagctcgactagcctcagactggaatcattgcagccgataaggggtcagcgacagagccagtcagtctggtgcgacgcagctgcgttcgtacgccggtgtacatgcgaaactccgccctatgccaccagcattccgtcgcaagcatcgtctctctgtcggccgggacgtcgcaagcctgctgcaacatctcaagctctgttgaggttttcctcgccggtataagttatatacggtcaggcgaagcaggacccggggagaccttgcggagctcggcagccctaccccttggcctgtgcacaaggacaacacacctcagccatgcccgtggcctgctggaggtcgaacagtacgctcccagtcagcactcggcttccggatcagcagcggctgcaaggtcagcggcggagtgagcaatgtcgtcaatcctcgcggctgatgtcgggccctcagcccgcttgctcctcagcctgccctggcgtgcaaccgcccctgcgcgtcgactcgagcggatgtgcactctgcagcactacgtcgctctcgagtatcgaaaaaagtctccttctatctctaggcgccgacgatcttgcccgtcttccatgctgcgttcttgacggcgagctcgacggcggcggtgccccagtcctgtgtcaaggacaagatggtcagcgctcgatatctcgcgcagcagggcagtggacgacgcacgtcgccgtggttatggttcttgtccgggttctcggtgctcatgcccgcccgctggaaggcctgttcgtccgtcaggcaggtgaggacgccaaagatgacgggcgtgcccgtctcattttgcgtcttcatcaggccgtgcgagacggcgtcggcaatatactcaaagtgcatcgtcgagcccttgatgaggacgccgatcgcaatcaggacgtcgtacggccggttcgcactcttgggcgcgggcgcgccgaccgaggcaccgagctgcgagagcgacgtcgatgagcccgacgtcagcaggtccgagacgccgccgaggagggtgttgggcgaaagcgtgttggagccggtgatgatcctgcgagcgagcgccacgtttggttagttacagggctctggacagaggccgccagatcgagggggcgagtctgtgatcgctgaccgagccaggaccgcagccgctcctccgacccgacgaagaaggagcccgacttacgatttcgccgcaaaaggcagctcgtacgagccagggaccgtctcgacgacaatgtcctcctccttaacgccggcggcgagcagcttgcccttgcagcccttgacgaggttgctgatgatggcgtcgttccagcgggcgcggaggatgcagacgcggaggccagcaccgtcggctgagaaggcagcagggagcgagtcggcagtaggagccatgttgggtgcgagtgagagagaaagagcgggcggtcgaactggggtcaggaagggggtctgagagatgatgagggtcagaggattggcggaggcaagcgggcgggcgtctttggcgcgccgggcgaggcgggaagcaggagagcccttcacgttgaccttctcccgtcctcttcccctccccttcacaaggcccttctctttctcgcaagtcacagtacagccagtcacgacgatggcgagactcgacacacccgaatcgttagtagcaagagagccgagcgaagcgttgccggaactgatgcctgtctttctcgccggccccttcgtcgcgcctcgttcagggaggagcaggagtcgagaggctcgatctcgggcggcgaggaggccgagcccgagggcaacatctgggaggccaaggaaatcctccgcgagaagcgcggcaaggtctacgtctcttgggtgtgagccgtctcgcctgcccatgtcgtggcccgccaggcgggaacgcgtgattgagtcccatcacgtttgccccctctccctctcgcagcggccaggacaagcagggccggccgtacccgtcaacctgggagcctcgcagtcactgcaacgaggctctccttgccgagtgggacgcgaagcaggaaattcgtaaggaagccgccgagaggcgcaagtcgggcggcggcgacaagtcagcgtctgctcgagtcgccgttgacagtaagagccagaagcggaagcgaggtcgggcctgcctctagccatcgcttgtctgtcaaacccaagactgactcgtgcgcctcatcgctcttatcctgtgtagagtccctcccggctaccagcgccgccaacccgtcgacgtcggccggcaacgcatcaaagaagcttcgccgccagacaacgacaggggccgccgaccggcgcgcgtcgctcccagagacggccggcgatgccgactcgaccgcctgttcgacatcgaaacgcacggtgccgaagcgcaaatcgttgtcgaacctccgcgtcgtctcggactctgactcggatgaggacgcaatcaccttcctgccgggctcgccggcccccgcggccagcggcgcaacgtacaactctcgtccggaagcggcggccgccaacggcgccagcgctagcggcgacaagggcgaaggcaagcagcgcgaaggaatggacgccgtccagacagcgcctgctcgggcgtcagcatcggttattgctcctgctgtcaccggtagcagcagcaaggacgcttggcccgctcccgcgctttctgtcgctcctcgatcgcagcaatcgagctggaacacctccagcttgacaaccacccagcttccgcagcgcgacggcctcatcctggccggcccgactgctggcgccaacggaggccgcgcggccgacgtcagtgccagacccacggctcccatcaacggcaccaagtcgagcgtgatcaaggagcctgtagtcgccttggtctctcagcggcgcctggctccctctgcgcctgctcctttggcctctacctcccagcgacggccgtcgtcggacagccaagtcaagccgtcgtcgaccgagtccgctcgcccgtcgagcatccagcagccggtggctcagagcgcgagaccgcgtgcggccatcccgatctcctcggattctgtcgtgcctcgtaaagcgggtcatgggtcacacacccgccccttcgatgaagaggaagccatggtggaggatgcgctcgattcaggtccgtcgactgcaggctctgctctattgctttcgacgccggtctgaccccttcttcttcgtctcagtcaaagcgccgactggcctgtcggcctctcaacctgccgttggaaccttaaagccgcgcaagctgtcagtcccgagcctgtcctccacagacgtccgcagcagcaacagctggtctgccatcggcagcagtgcagccggggtgagcgtgatgcggccgaggctgaccgaccaagccaagcccgtgcgctcggagacggactcggacaccgaggacatcgacgaccaggaggtcgttgctctgcctcacccatcgggcgagaccgacgaaagcgtccgccggcagcgccggtcgtactcgcccgccaacaagcgctatctcgaggccgccgcctacaacaaggcgctccgggtcgagaatgccaagctgcgcgagcagctcacccagctctacgacacgcaggccgaggaggctgcccagaaggctgagctcgaggtcaaagacaccgagctcgccaaggagcgggcggcgcacgcagcgagccgtagcctcgctcgacaggccgagcaggaggtcgacggcctgacgaaggagattgacctgctcaggcagaagctccgcgactccgtcgacactgaggccttcctccgtgagcagtacaacacggcctcggaggccgcgcgcgaccgctcgatgcagaacatggcactcgagagcgacattcagcgtctcaagaagcaactctcggtcggcgtcgcccagatcaaggccttctacgcagcccagatcagcacgcacgacggagcggtcgacacgctgcgcacgcaggtcgacctgctccagcagcaacaccaacggactggcgatggaatccgcgaccaggccgcacgcgtgccgagcctcgagcgtgaggtcggtctgctctgccgaacgatagccgacctccgcgattcgctggccgaggcgcaggaggaccgcgacctggccgagagcaaggtcgaggagctcgaggaccaggcccgcgagctcggtggcggacggcgtcaggttcagacggcctacgggcccgagagcgactcggacgactcggatgccgagtaccggccgccgggcagcactccggccccggccggtccctcgcagtcagctcgtgtcacgactgacagcagtgacgaggatagcccgctctcgcagctcgtccagcgaaccgtcagcggcatactcgccggcctcgacgccgacctcgaaagcccgccaagccccgacgcgacggcgcgcaccggtgctctcccgccgttcacgagctcatcgccctcgagctcgggctcgccggccccgaccgtgatcgagatgccctcgaccgtcgagacggcaggccagtatcacgcagcgccctccactgccagcctggctccgctggccgacctgcacccgagccccaactcggtctttggcagccagcacggacaccttgcgccgcttgacgagggcggcgtcttcccagcgggcacgatcagtctccagggtctcgagcgcggcttcaggtcgcagtgagcaggcgctcttcgtccttacatcgataccttctctctctccctctcgatctgtgccgatcaacatgagcctgtgagaaacagcgcacgcccgaggaaagcagggcggtcaacagacgcgttcgcgcaacggtgccttgccgcccacgacgagaggctcggcgccgtcctcctcctctctcacatctccatcttcctccatcaaccgccgaattcgcgaaccagctacttccagctagctcaacagagatctgttccggcacacgacccatctgcagctccgccaaccgtccggatcgctccggttactcgagctcgcctcgacagctgccgagcccatcggcccagcccgagcctgcgccgcgcaacccgagcaagcgaccctacgttcctccatcagctccccaccttcacaggtccctacctgatcactagctcgcaatgccgccgagcaagaacaaccggcaggtgcggcacctggagacactcggtctgtcgctcctgcaagcatccctcggctaatcccgaagcctcgtgctatccgcctcgacagaaagtgctgctgatggggcgatcaggttagggtggcatcgactgggtcaagcaggtcgacaactgacgcgtccacaccttcgcttcgttcagggagcggcaagacgagtatgcggcaggtcatcttgtgagcgagcgcgcgagctgctcgtccaacctcgctcgctgcgatggctgagacgctctcccttcaccttgccagctcgtctgacatgacgccgggtgagacggaacgcctcggtgcgacggttgacgtcgagagctcaaacgtccgcttgctagggaacctgagtctgaacatccttgtgaataacggccgctctcccatcgcgacagccgggacgagctgcgcaggcgcccctcccccggctgactctctgctctccattttcttcaggattgcggaggtcagcagtcctacatggacggctacctctcaacgcagcgccagacgatcttcaagaacgttgccgtcctcatctacgtctttgacaccaagtcgcgcgactgggaagaggacgtccgctactttgagcaggtgctcgaagggctcgctcagatgtcgggcgacgacgatgactcggccggcgacgacagcgacgatcaaggctctggccagcccaagaagaaggccggcgtttacgtcctcatcaacaagatggatctcgaagacccgagcgaccgggcccggatcgagcgcgagcgcgcggctgagctgctcgccaaggtcaagtcgcgcatcggcggccgctgcatggcgtttggcacgagcatctgggacgagagcctgtacaaggtgcgggccgtctcttctgctgtctgcctgtcgccgagtgctgaccgactcgagcgctctccataggcttggtcggcgatcgtccggagcctcatcccgaatgcccaccgcctgatcggccacctgtcgaggctacgcgagaaggcgcatgcggccgaggccgttctgtttgaacggcagacgttcctcgtcgtcgcgcgctcggcaccgctcccgccccgggtgctcgtcgacggccggctccggcggccaaagaccaagtcggttgtcgactcgttttcggggcacgaagaccaggacaacatcattgccgccggcgcagtcggcgcttactcggagagcccggccgacgtcggcgcgcccaaccggtacgaggttgtcagtgacatcttcaagatgttccgaattgcgatcaacacgtgcgccaagagccttattccctgcattggtcgctgaggctgacctttgcgccttcctttgcgcccgtacagtacgatcggcggcggcgagatggacacctggctctcagacttccggacatgctcggtcgcgattgaggccttcacgaccaacacctactgcatgctcctctcgaacgacttgcgcgctggtctgttctcgtctgagtcctgatgacggccggctggcgccactgactgcgcccgttttcctttgcatgcagacgctgaatacctgctcgaggagatccgcgtcgcccgggcgcactttgaggagctgcacacgggcacggtccacatcaagtgcgcgtgagtatcactccctgccgcctcagagccagccccaccccagccagtctcactgatcaaatcgtcttgagatccccaggctgtgcgcgaaggacggcggcatgcgctaccttttctcggacgcctcgaccgagcgagaggaccgggaggagagcgtgctcggcctgcgcaacgccgtcgccggcctctacctccagcagtcgtcggtcagctgagacgccgacggggtgctggtcagacgggcttgccgtctacgatgaagcgccacctcctcgctcctatcttccgctgcgatggggcgaataatgtcaagggatcgcccgggggtctctgctgtgtggcgcagagggcgcttcccaagtgccactcccgaattttcgttctccgcgcgctttgttctcgcccgcgcgggctcgcccgcaggctcaacgccagctcgcctgcacgcactcgtccccggcctctcgtctccccttgctctcctttgcctttctctagacgttccttccaagatggccacctcgctcgttcacgtcaacctgcctgcctcgggctcgaggtccgtcgcttgtttcggacaccgcaggcctcctgggcccccgagactggctcgagctgacctgcgcctcgtcttcttgctcctcgctgcgtcgtcgtctccgccgccttccagcagccgggccccgagctcgctcacgcttcagcctctgcctctcctctcgatcctcaaccacttcacgcgccgcccgacggcgtcgcagacgcgcgtcatcggtgccctgctcggcaagcgcactgaggctggcgaggtcgtcatcaccaactcgttcgccgtcccgcacgacgaggcccggctcttctttgccgagagcgagtacaagagcatgctcgagagcatccgcaaggtatcgggtgacaaggagagccttgtcggatggtcagtcggacactccagcgcgcactgccaggcgagcctagctgacttcgcgcacctcgtgcccgacctttcaggtactcgaccgcgcccacgcccgacgttttctcggccctgatccagaacttcttctcggccgagacggcaccgtacccggcagtccacgtgaccgttgacatctcggccgagggcaacgaggagggcctcggcgttaagggctggatcaggtgcgcccagtctcgctcgcgcctgcttctcactgctgccagtcgagaccgggcgctgacctcgtaaccgccttgcccatctctgcagctcgcccgtcggcatcactccgaacgagtactgctcgttcctcccgattccgctctcgctcgccgtctcgaacgcgctgcactcgatccagccgtcggcggcctcggccgcgccttcggccacgacgccgctgtcggagctcgaggcctcgctctcgacgacccgagccgatctcgcccgcgtgcgtgcctacgttgacgccgtcgtcaagggtgagcaggagggtgatgccgaggtcggccgggcgctcatggacgtctgcggccgcatcggcgagggcgaggactgggagaagaagatctctggacagctccaggtgcgttgcctgcctctgatgccccacctggttctctgcgagaggctccagaccggctaaccctgtgcgcgttggttctcacttgcaggatgctctcatggtctcgtacctctcgtcgctcgtccgctcgcaggtcgagcttgcgtcgcgcatcaacctcgttcaaacctaggcgtcccctcaccggcctctgttgccgcttgacgacgtccagatcccgctgcgccctgtactgcccctactctcttctgcagcggcggcgggcgcactagaccccctccgaccccgacctcccgtgcgcaactattcgcatggctgagccacgactttcaggcggagggcgaggtgcatcgattttcctggagtgctcgcgcttcactttttgagcgtccgctgcttctcggcaaactcgacgattttcttctcgacaaacatgcccttgcgcttgcggacggcgtcgacgtacgtcttggcgacgttggcgcgctcggcaagcgtgccgagatcctcaagctcttcgaccgtcgtcgggacccagaacgggtcctggtcgagcttctggtagctggagagataagaggggaacatcaccgtcagcgggaagagcaaggcgagaagcgagccgttgcaggacgcaccccgagaagatgagctgcgggctagccgctccagaagaccgcttgcggatctcgtcggcgaagccaaacgactcgacgaccggcagcagggcccggacggtgaagaacgacgtgccctctttcatctcctctgagacgatccgtccgcggcgacgggcgacgacaccgtagaccttcccgagaacctcagctgcgcggggcgaaggcggggggggggccgaaaagggatggtagccctccccagccaagaagaccccggttttgcgttgcgggacattagagggtgtggggagaggggaagcccagataagtcaggagagagaggcgcctgtccttcttccttatcgttagaggtcgtcaagtggtgtgcgggagacggtgtacaagcggcggtgtgcaggagctgagttcctagtctaggcgacgaggtcctcagttcttccggcggaaggagcagcctgcaggtttgaaggaacaggcgtcagtgcagaaaagggcctcggaggaggagacagcttgaacgcaccctcagtgagccgggcgagaccgccccggggctggcaaaggatcgtctggcaaccgccgcactggacggctgtggagcgaggaggatgcacaaggtcagcacggcaacatggacagtgaaaggcgacaggcgcacccgtgtcggcgtggctgaagacggtagtgatggcgtagcagccggggcacttgacgtcctgaagaagataagaagggcaagggaagaggtcagcgctgctgctccaccaacaatgtcgagccgctaggcaagtcggccaaccattcggcccccaccccgctatcgccggccggcagacgacctcatcagagcagcaagcacgcaccatgaagaacgagttgggactctgtacgagccgcttgagcttgtgcgacgagcgctcgtgctcgagcgaggggttgaggaggtcgacggcgagggtctggcagggcgggaaggtgcggttggtggcggagaggcgggcgacagcggatcaagggcaagcagagcggagcgacgagcgtcagcggaccggtcgacaggagatacgccaggtagcttcggcatagagcgaggaaggtgaggcaggagtggcggtggcacacgacaccatctcgagaggagagaccaagtcgccaccaccgcagctccagctcaaccgccgtcgcttcacccggacaagcgtcagaagggaggacgcaccattctgggtaggagaccttttagagagggttggggaggagagagagagagagggaatagaaagagggtgagaaggaaggaaggaggacgacgacgaggtggtgggtcggagagagcgtgtgcggggcgagagccgacgctacgaggcccccgggggtcgcaagaccactttctctcggatttcatcaaggaatcatctacgacctttcggctcgctccattcgtctcgacatattctgatgccgtctctcttcctcgacctgcgctagaggcgcctgcctgctgaacatctggctcgcctgccctggaacattcggggcctgtgcaggcccggagaacgaggtccgggaggaggaaaggcgggcatgggtcatccgcacgagcggcccctttttgctcgacgccttagaagtagcggccagagcgctcgcgaacgacggggtcgaccatccggcgctcaatcttttcccagtcgagggccgatagccaggcctgaacgtagggccgcttgccccagacgccgtgggtcgggaagtaggcgtgctcgtggagcgagaggcacgcgagcgggacgagctcgttggcgaccgtcaggaggttggtcggccggccgctcgtcggcgtcgtcgggggaccctttgaccgggacggagcgtgcgagccaaaggctgagccggtcggctggcggtgcgacaagccgcccgctgagccatacggcgccgactcggccgccgccgtcggtgccgacgtcgagaacgcccgctgctgcgactcgccgccctcatccgccgttgtctcggatactggagcgcggatcgcctcctcctcaaagacgtggccttgatcgctcaggccgatgtcgcgcagggcctgagcgctcttcccccggatcggctggccagcgcagacgaggagcgtgcccgcgccgtaggtcgcgacgatcgcgaggtcctccttcccgccgttgcgctcctggacaagccagagccagccagaggacgtcatgccctcggcgtagccaaggaccgtctgctcaaagcccgagttggagccaaacgaggcgacgaggtgctcctcgatcttgagcgggtacgatccagcgtctgccgggttgcgctgcgacgggcacaagcaatggaaggaagtcagtacgaggttgcggccttgaggatctggaattcacaaacgcacaagcgacgagaggaagaagttgtggttgatggactcgcagctctctgcaaagagccggtcccacgagggcaccatcgtccgctcgcgcttcaggttgagcctagcggcctcagcgttgcgacgctcaatctgctcctgctcggcgacctgggccgggctcgaggtctcggccagcggcttctgggtcgggtacatcaggagcgggaccgacgtcgccttgacaatgtcgagcacggtcgctcgcggcagccgcttgacggccgtgtcgtcctggcccattgcgagcgcgctcagcgagttggccgtggcgttgatgctccccagaagatacttgtggtagttcttgacggcctgcgtgcgggcgaggcgaggaagggaggtcgcatgacgggttggtcaggggtccaggagcgtcggcgagctcgaagcggcgggacacaccttggtcccctttgcctggaacagcttgccgaccggctttgtcgtgtcaaagccccactgcaagctcggcgtccagacgaatgacgaggccggctcggacgacgacgaggccgacgacgagtcggtaccctctgccgttgggcgcgaggtcgagagaaggcggcgcgcggcggcggccgagctgctgctgctgctcgagccgaccggcaggcgggaggacgacgcccgcggcgggactcgcaggagcgggcgggagagcggggcggtaaccatcagacgagggcgtacgctgaactgctggcgagtgtcgagggttggtgggaaggggagggtcgaggtcgtggttgtcggtaaggcggcacggaggatcgaagcgcaaacgcggaccttcgaggaaaacgccagcacagggcgcagtgaggaccgaccgaccgcacacgatctcgtccaggactcgtagctcagggctcctgtggcagcgaggaggcagcaaagcctttgggttcaaggcgggttctgaggagtaaccaactttgcctcgctgggccctgcgacggcctcccgccgggcacacgccctcgcctttccaatctgagcgcatcccctaaacccgtttgacgcgatgctcagtgcagtgtcgttcatgtcacataggtcctacatgaaggcggtaccagcctgagagcgggcgctagccttgctctggcttttaacggcgttggcggcgacagcgagccgttccggttgctagagagggagtgcgcaagagcaaggtcgcggtcagctcgagaagatcagttacacccagcagcaagctggaagaggacgcacgtcgcggtagtagtagagcttggcgctgcggtgcttgcgaatgttgcccggcttgccgtcggccggcttgatcaccttgacctcgcgcaggagcgggctcgagcagtggtacttcatctcgacgcccgtccggagtacggcgttccgaagcgtaaacgtcgtctcgcatcctcgacgccggacggcgatcaggacgccggtgaagttggtcgcgtgcgtcttcgcggccgtcgtccagctcgagacggtcatgatcgacccgggccggaccgtctcggggttatccttccggttgaagaggtagtggaacgagttggggtcctgcgagagccgaagcgacgtgttgatgtgctggagcttattggtccccgacggcgggaggatggtcgtcttgggcttgggcaccggcgggatgaatggcaccgtcgccgtttttgagaaggggtagacgcgggtctgcaacggccgggctggaaagggagcggcacagggcaggtaagaagggtcgcgaggtagcaaagcagaggggtcagctaacggagatcaagagcaggcaggatctagatcagggcgagagcagggagctcgtgcttcgaggagccccccggaccgccctcttcgagctctgcgagggcgactcacggtcgataaactcgaagtccttgaacgcgcagttgggtcctcccggccgcttggggacaaagacgggcagaatggcgacctggccagtcgacgtcttgtacggtgcctggacggccgacgagcggctgaacgaccggcggagcgaggttgaggacgacgggccggcggctgcagagacggcccgcgggaggccgaagagcgaggacgaagccgcaagggaggacatggctagcctgaccgaaagagaggccgtggggagcaggcaggaaggtagataggtgggctgcgagactagcaggcgagatcggtgaatgcggcgagggtcgacggtgcaggctggcggcggcggcggcggcgagctcggaggcagaaacgcggcggcgcttcgtcgctctcagcattcagcagcagcgccttgtcaaagggccgactgcacgatcgtagtcgcctttcgatcaacgcggtctccttcaatcatgaagtccgcgtgatccggtacggtcgattcctggtctcgcaaacgaccgaggacgcgacgctctggcaggctggcagccgacagctgctccacgaaggttcagccctcatctggagcactatcttgccgactacaggtgctgaagccctgggcagttggatgataaagaggcaggcatgaatcggcaggtggagctgcgcatgcgggtgaccggtgctactagtattgcaacagcggggtttgactacaaagaccccgggagagagagagcgagtgcggagggaggtgcgaagtgttgttgagaaagagggtcgacctcggttgaggaggtcgatgcagtagcgtggtcgtttctaggcgtcatgatgaggaaggggcgggaggtgcgggaaagagaggaaaagagtcggcaaaacggctccttttacgccttggcggggtaagtctcacgggcccactgttgagagttaaggaaaggagaggtcagtttacgctgcagcggagtctgaaggagcaagacgaagaacggaccttggcagcctcgacgaggttctggagggcagcctcagtctcggcccaagcgcgggtcttgaggccgcagtcagggttgacgtcgagaagctccgaggggatgagggccaggtaggccttgaggcgctccttgatctcctcggttgaggggacacggggcgagtgaatgtcgtagacaccggggccgatgccgttcgagtaggtgtgctgcttgaagacgtcgagcagcttgaggtccgacttcgaggcctcgatcgagatcgagtcagcgtcgaggcgcatgatcgagtcgaagatgtcgttgaagtcggagtagcagaagtgcgaggcaatgaaggtcgagtcctcggcgacggcggtcgagagccggaacgagtcgacggcccaaaggaggtactcagcccagtcggtcttgcggagggggagaccctcacggatcgcgggctcgtcgacctggatggcgtaaattccagccttctcgaggtccgagacctcgtcccggagggcgagggcgagctggcggcactggatctcgcgggggacgtcgatccgggggaacgaccagttgaggatagtgacggggccggtaagcatgcccttgaccggcttggacgtgagcgactgggcgtaggtcgaccagcggacggtcatggccttggggcgcgagacgtccgagacaatgatcggaggccggacacagcgcgagccgtacgactggacccagccgttctgggtgaagatgaagccctggagctgctcaccaaagtactggaccatgtcgttgcgctcgggctcgccgtggacgagcaggtcgaggtcgaccttctcctggaagcggatgaccttctcgacctcagcctccatcgccttctcgtaggcctcagcggtgagctcgcccttgttgaacttgttgcgggcaatgcgaatctccttggtctgggggaacgagccgatggtcgtcgtcgggaagcgggggagcttgagcttctcctggtaggcggccttgcggaccgggaacttggacttgcgctcgtagtcggactccttgacggcggcaacacggtcgcggacggccgagtcggactcggtctcaaagtcgcgccgagccttgatcgaggccttgttggcctcgagggccttggcgtacttctcgtcggtcgagcccgaggcggcgtgggcaagggtggcgacctcggcaaccttctcgagggcaaacgagagccagtcggcctgctgctcggtcaggcgcgtctccgacttaagggtgacgggcgtgtggaggagagaggaagaggtggcgacgatgatgcggtcctcgccgagggcggcgatggccttcttgaccgtctcgagggcggtggcgaggtcggccttccagatgttgcggccggagatgagaccgagcgagagaatctgcttggtcggcttgagggcctcgagggtggcctcgagctgcgaggcatcaccgcgctccgagaggtcgatgtgaagaccggcgacggggaggtccttgacaaagtcgagcgacttgccgaggcggccgaagtaggtcgtgaggatgatcgacggagcgaccttggagagctcggcgtagaccgacttgaactcggcgccaagcgactcggcccggtcgaggacgaggacgggctcgtcaatctggaccgactcggcgccggcctccttgagctgcgagaggagctcggcgtagacggggacgagcttgtcgagggcctggagggcctcaaagccctcggcggcgtcgttggccgccttggagaaggcgaggagggtgatgggcccgaggacgaccgggcgggtggtgatgccgagcgccttggcctccttgaactcatcaagggccttgttgctgttgagcttaaagtcgacggcgcccgagacctccgggacgatgaagtggtagttcgagtcgaaccacttcttcatctccatggccgacaggtcaatgcccttgtcgagctcctggcgaccgcgacccatggcaaaggcaatgtcgagagccgacaggccgtgcttggtgtaccgctcggggatgaggttgagctgcgcgcacgtgtcgaggacgtggtcgtagaaagcgaagtcaccgctacaaagaggatatgaaacgttcgggtcagcgtcggccgatgaagagggcgacacggtgaaaagagtagagggggacgcacgaagcaatcaggtcgacgccagcctccttctgcgtctgccagcgggtggcccggacgtccttggccgaggcctggaggtcctctgccgagatcttgccagcccagtacgactcgaccgacttcttgatctcacctgagaaagacggatgtcgggatcagccgaaggcgcaagtgaaaaaggtcccgctaagctagaaggaagactcacggtttgggcctgaatgatagggacgcaggaagcgagagcaaggaggaaggcggacgaggaggggatcagcgagttgctcctcgagatggaggatggccctcgcacgttcggaggaaacgggccgagggctgaaaacggcgcgtcggaggagagcgcgcctgcctccaacgcgctgtcgatacgaagagaggaggacgcaccgatacgcggatatccgagaacactggaagcgaccattttcaaggaaagagagggatgagatggtgggggggagggggggttggtggtggtaagggagagaacgacaggccgccggtcgtcccatctttttgtcgtcgcgcctttccggcccgctcacgccttcggtcgcgcggggtcctccttcgccgcccctcaagcgttttgccaaccaagccgggctcgaggaaagatctggcggattctcggccttgctgccagcacgcccgcgccatcgcgcaacaaggccctgctggagactccatgcgccgctcattgttattcggagaagcggcgaccgtgattcgtagtacggcccgctatctgccattttcgcgaacgcaggattgaggtagctcgtgctcggccgtcgttcgtgctcgctccgacgacgtgctcgcctgctggcgcacccaacagcaccgcttgcagcaagacacggcaagcaagagggcacatatcgaaatacaataggggagagaagaaagggggtctagcagcagtctacagaaaagaacagaggggaccggctactccatgccgacggacgcccgcttctgcttgagcgcggccgcctgcgtcgcctcctccttggcctcggcgatctcgccctcgagctcctcgcgcatgtcaagcacgccggcgtcgtcgtcgaccgcctggcgttcaagcaggggcttgatcagccggtcaaagtacgggtgcactgcggagggtcgacggtgagcggtcagctcagggcttcatggagggagggaagggggggaccggtggcaacgcacccttcggcagtgggttcgcccgccggacctggtcaaagtaggcctcgtagatctggccgtcgtaccggccgaggggcgagttgatgatgtggtcgctcagggcaaaggcgtcgacgagcgggactgcgagcgagcgcgtgcgagaaggtcagacaaaaggtggaaaggagagtcgaagggacgaggacgcaccggcaacagcgcgcagctcggcacacagcttcgaaacctcacgctcaatttcgtccatctgcgagggcttgaagtaaccgtctgtccgtcgagcgaggatagaagggtcagtcgcggcgggcaggagaaggcaggcgcgagtgaggtagactgacacttgaggaaggcgccggcctgctcctcgatctggtggaggccgtaaagccggcagttgatgacgaggacgtccttctcgggcgagggcggcatgttgtcgagcgccgagcggaactgagagggagcgtacgcaaaccgggttagcatggtatttgacggcgtcgacgacaggcaatgaccaagggcacgcacagcacggaagatgtagccgacagtgtggaccttggcggcaacaaagcgcgcctggctgcacgcctccatcgcaacctccttgctctggccggccttgacatcggccgcgtactcctcagacaccttgcggacgaggttggccgctgccgtcgcccacgccccgtcaatgtcgtcgaggtcgagcttgccggtcgacgtcgccgtcagcgcggccggccgggcgaggtaagcgacgcccggcgggagggccttgcccttgagggcgtcctgatagctgctgatgagcgaccggccggcctggagcgaaaggatcgtgttgtctccctctgtaggacgtcgccttaatcagctttcgaaggcggtcgaccagattgaagggggaggtcggcaacgcaccccacgtgcactggacggcaaagtcgttgtacatggccgggaagccagagtaggccgagtagccgtggccgccgcagcactggcggcaggtgtcgattgtctgaaggcacgaccacgtgcagaaggctgagaagaggttgcaggacaccatgagcgcctgcttgtagacttgcaagcggaagcagctgcggactcacccttgaggccggccgaggtcgcgtgcgtctccttgagcttagcgaggacgtcgttgaggttggggtcgttcggctcgagcacctcgagcgcctcggtcatctggttgtacatgcgctccatctcgagcgcggtgaaaccgccggcgatcgcctgcgcgaggagcggcatgagccggcgctggtggatcggatagtcgagcagctgcgtctcgaccggcttgccaccggccgcgaactgccgccggacggcagcataccggacggcgatcgtcagcgccttcttggccgagtgggctgcatcggcgaccatcgaagtccggccccagagaagctaaaaggaaggaaggcgacttgcgtcagtgagagctaatgagaagattaaggcaggccgggcactcacagcgccgtacgtcagctgagcaagcggcggctcgaagacctcgcccttgcgcgagaccctggtgaagcgcagaaagaaggtcagcctttgacactggccaggaagaagagccgcagtacgcactgcgtgtgcttcattagcatgtgcgagcgcggcacgcggacgtaggtaaactggatgtagccgttgtcgatgccgtcgcggcccatcttcttcccaaggtcaccaatgttgacgccagggagcagcatgaagctcctgccgacggggagagggcgtcagcaactgcagaggccagatgacgtcaagcggtgggacgaacttggtgtcacgcagctggacgacaaaggtcttgacaccgtgcttcttgccgtcaataacgagctgggcaaagacggcgcagtgagtggcggtcgaggccgcgccgccgatccaccactttgtcgcgtaaaggtgcggggtgtggatgataaactcgtcgctctgcgggtcgaacgttgccgtcgtctcgatgccggcaacattcgagccatgggcaagctgaaggagaagagaatcaagtcagcctcgtggccctcaatcggactttggcagcgggacgcacctcagtcatgccgaagcagccgatgacgccgttcaggccgaggacgcccttctcaatccagctggaaagaggtcgacagagctcaggtcagcatgaggcagcggtttttggccgagcgacacgcactagttcatctggctggtcgtcgcgccgccacggagcgcgccgaggaagagaccgtagtggactggcagagacatggagacgtcagaacgatgcactcgttggctcatctcggctccgacacacctccaaaacgcgtccagaaggccgggtcggcgatcccaatcagctgcatgcggagggcaaacgtctcgagcgactcggtcgtgacatagtggacctgcagcggaaggggttcagatgatcagctccgggtgacagggagtggccgcgagagatggccggccactgcaagccagccgacgcctgcccggtggcagctagtcgacagcctgttggaagaaatactgaccatcgtgctgaacttctccatggtccgctcgcggacctcgtcctttgagaggtcatggatatcgtcgagtcggaaggctggcgtccgggcaatttcggccatgaactgctccttgcgagcgagcgccttggcggagccgtgcatgaggaccgagagcgagcggacgttgaatggcgggttggcacgttcctgtagatggatgagggtgaggtcagtaaggaggacgatcagggaagctgccaggcaggcggggaggcgggcggctcgcgatcgcggccgaagtcgaagcagctcggcctctttccaaggccatgccgcacgcagcctgccactgcaaaagcggaggtgatactaacgagcgccatcgtttcggccgtcgtcggcttgggacgcgggaaggccatcgtcgacaggtgtcggagggaggaaggagggagggagggaagggaagggcggctggttgaagatcgaggccaaaggtgtgagatcgatttggttttgacttgagcaggagcggtctgccttgctgactgagtggaaaaggcgtcgattccgatgggatcgaagagtgaagaggggatggtggttgtgaggagacaacgacgggtgggctgaaagagcggccggctgcttgctttcggccggcggccaagccgattgccggaagggcgcgcgcagcagccccaagcacccaagctctggtcatcggcggcgtgacatgtgtcgctcctgtgtgctgtcgatcagattcgatctagacatgatcagatctggagggtaaggaggcattcgaagcaagacgacgagaagttgtgagcgacaaccacaagggcagaggttgcctcccttagcttcagaaagtacgaaactctgctctcattcaacgtatgactcttctcccaccgtcctttctgactccccggctccctctggccaatccggatattaacgcagccccttcgcggtgtaacgtcgggagcaggctgccgttgtgtgtcgaggatgatggtccaagagggagctgagtgcaagcatgtataactcggcagattgccgcccaccagatgcagctccagcagctcctccagcagcaacagcagcagcaccaggtgcaccagccgccccagcagcagcagcagaaatagcagcagcagcaacaatagcaggctggagggggcgactctatccgtccctgcctggccagccgaacaacggtcaccgcagccggtcgttgtcggctgcgtcgcggccgatcgctcagcttccaaccggttcgtgcctctcgtcgtcgttctcgggctcgaccggcggcggccagatgtttgccgacggcagcagcagcggcagctaacacggccccagcggcgtctcgcccgccggctctggttcggtgggcatggccgctcaccggtctctcggtcaacagacgctgctcctgtcgtccgactctggctcgtcaccctcgccctctaaggcgccgtaccactcgtcaggctacacgtcgtctattgacgatacgctgccttcagacgcgatggaccctttcacgacgtacacggccttctcgcccccgacttcgaaccacggcctttcgccgatgtcgctgtcgaacccctcggcagcggccaatggcggcagcggcggcgactcgccctcactgacgaggtacgcgctcgaggggctcaacaacctctcgttcgactcgctcgccaagccacgaccggctcctgtcggcccgggcctctacccgagcgaggccctcatcggcccaagcaaaagcatcaacttcaagagccgctcacctccggtcggctgctgaccgatgagcctaaggacgacgatgaggaagacggcggtgacgttacggagggcgaggacgactaccggccgcgcgtcatgctgcctcgcatcgtcgtcggtgcgtcctcgcgcgcgtcgtgggtccctgccgggtcggacgaccaggtcgcggtcgagatagcgtcgtcgccatcggatgtcgcgctcaagggccggccgttcctctcggctgccggcccgtcctcttcgacgtcggcaatcggcagcggcagcaccgaccatccccggtcgccgatcctaccggccggtctcgaggctgtcccgcctgagtcccgtctgccgtcgattctgccgcggtccaaggcggcctcgtcttcggacaagctctcgtcggccagccgccgccttcgcacgaccttggcccagcacgatgaactcttcgatccggtcgacgagctacggctcgtctgacgaggagtcgttgcctgacacggtcatgtgacgagactttcagcgggctacacatcgagcgcgcgacactgcaacttgagactcatcgaggaggcgctgctctctttccactaggaggtagcctttggtttggggataatagggacgcggtttgcaaaatggtccggatgaaagggcatcgcaaggctttatcaggattcccatgaaagcccaagagtggtcgagttactgcaggtggcccgttatgctgcccgaggctcagtgtaatgcctgacgacgtttcgcgagcccctcagagggccttaggtggctcgtggcaccccgccggcccgtccaggcgcccgccaccgctcccatgctgccctgcgctgccctattactcggtcagttgaccaaagagcatccattactcttctgttcccccctcaaacttgccctcttctcggatgtcgcaccgcgtgcctcgcacagaccgttcggtctcgatcgtctggcagcggccgtccacgccagcgatagacgagagctaagcatgcagatacaagacagaagccaacatgtagtgcgaagatgtgccacggacatgggccacaaaagtagacgaactgaacttcgggtcggccaaggaaggcagctttcagtcaaagcgagcggacaacccaccttggccagacctgtgagaaagacgcaacagctcacacctcgtcagcttggatgcagaccgagacggagagctagcgacgctccggctgacaacggctggcgtatgagagagcgagtgcgtgagggtctcggcttcggggtcagataccagagcggtcacgaaagtgctgtcaacttgtcgtcagtcgtgagcgctcaggctgggtcatcaaccagccaggcccagagcccagactcatcgagtagtcagatcgagcgccggacgacggaggtgagctgcgagcgtcggcggacgccgagagatacggtaggccaggtcagcaaggagcggcgagcccgccgtatgccctggcaatgagtcgagcgagagacggcgccctgctcgagtcgtctcgcgcacctgtagaacgagagacaggcaagctcgaggtgactggtgtcggagaggcgcggcgacgcgtttggccgcgggcgaggaaggcgggccggagccgactgggcggcggcgcagatgcacttggtcgagcttgtgactagccctgttgcggcggccgactttttacaaacagcatataaatctgatttgaccacaggtcatcaaaggtcgctgtagctcaattggtggagcgtacgactgaagatcgtaaggtcacctgttcgattcaggtcagcgacatactttttgccttcccgcagaggccattccgtttgctcaatcagcggagcctgacatgatgcgaggtagcgcggcagaatcacaggcagacggcacgggctgcctcccagcctgaaacatcggttcaacgctaaccctgagatggaatttaagaggcaggtgcgatcgtacgctaaacgtccccttccagcttcaaactgagctcaccatcgtgctgacggacaacgaccgagcatcaggagccacgccatcatagagctcgacctccacccttgttgagcacatgcccagcaacgctcacgactccacccgctcattcgcggccctgacgagcggctccctgctcgagccggtcggtgaccatctcgcggaagttgttgacgatcaggctctcgcgcttggccttctcctcggcctgcagcttgaggactggcggataagggggcgatggcgaagtcagcaaacggcagacagaatgcgagcgtaaggaggcaggacgcactaccgcgcttctcctcggccgtgatgacctggttctccttgcggagccggacggcgttcatccgggcgtgccggctgcccgacatgacgtagccttggctctcgaacatctcgatctgggttgaggcgaggccaatctctcctcggcgggggatacgctggccctcggagacgaaagcggccattgcggaaccctctccgggccggaggtgaccgccgaagctgaaagcagatacgaaaaaaggcgtcagcaagccagacaattggagacctgaggaaccgctggaggggacgcactctccgccgccacgagcagccgccttctcctccttggtgcccgggaggaccggcccgacaacgtcgtcgtcctcgtcgtcgctctcagcctcgactggctttggcggctcgaacgcgtccgagcccataaggcccatcgcgccctctttgccgccggcaagagcgaccgtcccgtcggcgacggccgagcgagactcggatcgcttgctccgcctccgccgccggtcggcatccgactcgctctcgctcgacgactccgacgacgacgagggcgaccggcggcgcgacgaccgctttgagtcgtgcctccgggacgacgacgacttcttgccggacgaccggtggtggcgcgacgacgacttgcgcttcgacgagcctcggagatcgtcgtcgctaacgtcgtcagagtcggagtacgaggccgcccggcgcttgcgcgacgacgacgacttcttgtgccgcgaagacgacgactttttcttgctcccgctgtagcccggcaggtgaaaggagtcagtcgggaagggcggaacgtgatggtggagaaagaggacgcactcatcggcggcccgcttgggcgacggtggccagaccgagaagtccatttcgtcgcgcttcttgcggcgcctgcgagggaaaagctaaaagttagccgtcgccaaggggaagagcatgagcgaaagcgagcaagcgaacgcactctgcgaggtagtcccctccgccgcccatcaccgggccgccaccgctgaagccgccaccgggccggtttgtcggcgccggcatctggcgctgccagcctccgccgtcgttgtgcccgctctgctggccgtagcctggccctccgccgccgccgtaaccctggcctggtgcgccgccgtaacctccgccgccgtcgccatagcctccgccgggagggccaccgctgtagcctccaccgggcagaccgtagccgccaccgccaccgtatggcagcgcctgctgttgctggtagccagcgtacgtcggcgacggcctgcgctcgccccgaggcgccggaggccgccggtcgtcctcctcgcgctcatctcgatgccgctggtggtgcgggggctcgtcccggccgctccggccaccggcggcgtggtcgtcgtagtccctgcggtgcgagtcgcgctcgcgctctccgcctcgccggtcgtcgcggtcgtcgcgacggtagcggttgtctccctctctcggccggtggtcgctgctgctgccgccgtcgcgctcacgcctgaggcggtcgcgcaggtcgtcctcgcgcgagagctgctgctgatggtgacccggcggcggtgacggcggagcgcgggccgagaggtcgttaatcggcgggatgaaggcttgtctgctcggatggaccgacatcgtgttgcgaggtgggtgatgagggcgtgccctgcgagctgctgcgagtcgtcgtcgtcggcgcgagggtgcgatagatgaaccggaggaggattcaaaatcgatctcgcacgcgcgcgccgcgtctcgctctcacgccagcttgcccgtccgtctcccagcccaccccttcccttcctcattctctcgacacaccctttctctcttcgccgcagatgtttggcggagcaaacgcctggggccagcagaacaatcagcagcagcagggccagcagcagcagcagccgaccggcggcggcctctttggcggcggcggcgccgcaccggcggcaagcggctttggctcgaccggcggtgcgtcctcgtcaagctcggctttcttccgacgcaacacgagtgggctcgatgacggcgacggcagctggaggcttgacttgccttgtcgtctgtcgaaggacctcagcgtgctgggcctcgaggctggcgagggagctcatcgggcggcgtcggtcaacccgctcgtcatctggctggccgcagcccctgttgttcatcggttgctctgccttcgaggcagtcgctgataatcttaccatctcctacctccaggattcggatcgacaccctccggctttggccagccccagcagccggccgcgtcaggcggtctctttggcggcggcgctgctcagcctgcctcgacgttcggtgcgactacgtctctcgccgttgacttgaagacctcattttgctgacgctcttgtcttcctggctcaatctgccttgccccccgctctaggcggctttggcgcttcggctcagcagccccggccaggcttcggcgcgtccaacacttcaacaccctcgttcggcggctttggcggttcggccgctccgacctcgacctttggcgcgcccgccgccgcgcccgcgacgggcggcggcctctttggcggtggtggaggagcgacgacgggcggctttggtgcgtcggcgggcggattcggccagccgcagcaggcagcgggcggctttggccagactggcgccggcgctggaaagatgacgctcttcggccagccgcagggtggtacgtccttcctgcccggtctcacacaccaggcactggtggcggctcagctgacgcgcgacacccattcgtttcgctccagcggttaataacatgccgggtgacgtcccgccgaacggcactcagcagcctggatggacggcaacccaggaccaggaccccaacactggcgtcaaaaacaacgacttctaccagacgatcaccgccatgcccgaataccgtggcgcttcgctcgaggtttgtccgccaccagcttctgtcgactgtcgccatcactgacgtccctcctgctttctctgttgcaggagctccgcgtgcgcgactacgagcaggaccgcaagggtcctcaggctcagccggctgcgaccggcttcggcggcgcgactggtggctttggcgggttcggtgctcagccagctcagccggcctccggcggcctgtttggcggcggcgcgtccaacgcttttggtgcaccgaagccagccggcggactctttggcagccagcctgcgtcgaccggctttggtgccgctacagctgcgccgagctcgggcggcctgtttgggggcggcgtgaccggcggcttcggtcagcccgcacagcagcagcaaactggtttcggtgcgcagccggcggcgcccaagccggcgttcggcggctttggcgcgagcacgacgcccgctttcggtgcgcctgccgcgcctgcttcgaccggtttcggcggcttcggccagccccagcagcagcagcagcaacaaccccagcagcagtcgacttttggcggtttcggtcagcctcagcaacagcagcagcagcctgccgcgcccgcttcaggcggacttttcggcagccagccggccagcggcgggctctttggagctcaggcgcccaagccggccggcactggcctctttggcgcgcctgctcaacagccggctgcgggcggcggccttttcggtggaggcgcatcgaccggcggcggacgtgcgtcgctccacctctgttcgccgaaggaagactcgctctcagacgaccgaacctgaccccctccactcgttcttgcagtcttcggccagccgcagcagaaccagcagcagcagcaacagcccgcctcgggcggcctctttggccagccgcagcagccggctgcctcgggcggcctgtttggaggaggcgctacccaacccgctggccagcagcagcagcagcctgctcagggcggcggactctttggcggcggcggcggtctctttggccagaagccggcgacgcccgccccaacgggtggcctctttggctcggccccggctcagcctgcccagaccggcgggggcctctttggcggcggcgcgggctcaactggccagtcgactggtggcggactctttggcggtcaggcccagtcaaaccctgccggaagctcactctttggcgccaagccggcgtctggcggcctctttgggggcggagcgagcggctcgacgggcggcgggctctttggcaactcgctcggtggcgggcagtcgagcggtctccagctcggtggccagcaacagcagccccagcagcagtcgctcttcagcggctttggccaatcgcagcagcagcagcagcctcagcagcagcagcagcagcaacagcagccgctccagcagagcctccaggcttcggtcgaccagaacccttacggccggaacccgctcttcgaccagacgtctgcggtttggccgcttgcgccgccaaccgacaacacgccggagaagaagccgcctctggccggcctcgcctcgcgttcgcggacgctgacggccagcaagaatcacccccggctccgaggcttcaacccgccctctacggccagctctcctcggagcgcgagccccggcctagccgacccgagcagtccgggctcatttgttgcccggcagagcgtcaagaagctcatcctcaaccacaaggtcgacagcggcgacatgctcggcgcctcgcggggctcgaatggcggcggtctcggcgcaagcaccagcagcggtgccggcctggccgacagccagcacgagcgttcctcaaagctttcgttcgacggccgcggcggcttcgacggcatcttcaacaacgactttgggccctcggccggcacgcctgccaagacgcagcagcacccgccgctcgcgcgcaacccgtcgacggcctcggttgccggatgtgccatcaagaagcatgccgagccggctcctccggccccggtctctgccgcgcccaaggcgccgctccagcacggcgactactacactaagccagacattgacgagctcgttcgctacggctaccaggacttgacggccctccccaactttgtcgtcggccgcaagggctacggcgaggtcgccttcctcgccccggtcgacctgacctcggtcccggcgatccgcgacatccccgacgggatcgtcatctttgccgagaagatgtgtgaggtctacccggacaacgtgcccaaggccccacgcgggaccgggctcaacgtccctgcccggatcaagctcgagggttgctggccggtcgacaaggcgacccgcgagccgatcaaggacattggccacccgcgcgtcaagcagcacctgcgcgtgctcaagaacatgcccgagaccgagttcgtcagctacgaggccgaaccgggccagtgggtcttcaaggtctcccacttctcgcgctacggtctgctcgggagcgatgacgaggaggaggaggaggaggaggaggctgaggtcgagcaggtccagcaaaagactctcgactcgttggtcacagccaccgacggccgcaagcgcgtgtcgctttcgccctcggacacgtccatctcctccgacggcgatctgtcggcgctttcggggaccgaggttggctcgccggcaatgtcggtcgactcgttctcgcccgacgactactccgaggttgacgacgacgagacgacctcggtcgaggcccgaccaccgccatggggcgcggccgctggcgtcgagccgcgcaaggtccaggtcatgcaggcctctttttttggtaaccgggagggacgtgcagccgacgtcactccccgggcttccaggcttgcccccagcgcccctgtgaagaggccccttccgttcaagaactccgtccctgccgaacctacctttctcgtaacccaccctcactcgatgcccatcggcggatcgcaggtgcgtccagcttgcgaattgcttagcaggggaaaacgctgacctttcgtctctccctcacccctcgccagcccgccgccttcggctttgatatcaactctctccaggctgtcggccgccgattcgcccagcccgacccgcgcgacgtcccgccccatcctagcctccagtcgttcgaggttaccaagcttcaccttaaccagtcattccgtgccggcttcgggcctggcggtcagctggtccgccttgccaagtcgtctgacacctctgactcagcgtgcgtcggccgttgcctgccctttccttcgagctcgcacgacagctgacgcctttctcgacctatcacctccagatcctcgtcgtctggaaccaaggtagtcattgagcagattccgaccctctcgcgcgaccaagtgcgtcttgttccctcgcgctttctttactttgggtagtcaattgaccatctaccgccacccctctcccaggcaaccgagagcgagaaggccgcccgcgtgctcaaggtccagctcgagcactcagacatcgccttcgaggacggtgtacctgtcgctcggccgtccgacgggctccgcttctaccatttctcgtcttcgtttggagccgacgaccaaggcttcgaggcccagctcctccggctcggctccgctctctttgacgagatcgacctgcgcctgccggacgacgcgccggcctcgctctcgaaccgcgtgctgcttctccggcgcaaaatggctgtgtccaagtggctccaggcttcggtcgcgggcgctgtcgaccaggacctgcttggtaaacaggagaacggccctggtcgggtctttgcgctgctcaccggccatcaggtcgagcgcgcgacccagaccgcactcgacggtggcgacgtccgtcttgcgacgctcatcgcccgcatcggcggcaaccaggcgttccgagacgaggtcgccctccagctcgacaagtggagaacgcaccggatcgacagcgagattgcgcccgactaccgtaaaatctactcgcttctcgctggtcacgtcggcacctcggccggcagcagctcagccgaccgcgctgacgcctcgcccgaggtctttgtccccgagcgcctcgactggaagcgggcctttggcctccatctctggtacgggtcggccttcgacgccgatctgtctgacggcctgcagcggttccaggacgcgctcgcgtcgactcatgcgccggccctgcctgtgccatggtatcaggaggcttcgctgtcgacggccgaggcccggcggtggcacacgccctcccagacgctcgacacgctctacctgctcctcaacctctacgccgacacggcgacgtcgctcgagcgcgtgctcgacccctcgaccttcgggccgacgccgctcgacttccggctgtcgtggcacctttacacgatcctcgcgctcgccttgcgctcacgcgactttgcggaccgctcggccgtcggcgcagatgaagaggccggcttcagcgccgccgccaacaacctgacggcgagctatgctgcccagctcgaggagctcggcctttgggaccaagccattctcgtcctgctccacttggagctgccggagtcgtacgtcttccgggtacctctcgctctgacctgaaggccggcgcactgaccctttcgcgtatccacaggcgcaagaaggccgtccaggacgtcctcttccgcaacattaattcgagcgacgcaaaggaggcctttgtcgtccagacgcttctcgtccctaaggaatggctgtcggaggccagggtgcggcctgttgctgcagcgtctccggtcgatctatctaactgacgcttccattctgccctcgtcttcaggccaacaccgccaactaccgtggtgacccttacgcccgctactttcacctcgtcgatgccaagctctataaccaggcttgcgccgtctgcatccgcgagctcgtcccggaggcgctcttgcgcgaggactttgagctcgcggcagagcttctcgccccgctcaagtctgtcgccgtcagcgactgggcgaccttgggccaggtgcgcctcctcgcttgcgttcctggccgctcccggctgaccgttcgccattccccgccgtcctgcaggccatcctcgacctcgtccagatcatcacgcggatgccgtcgcttctgatcgacgccgtcggcggcacgctcgatgccgcccagtcggacgagatggccgacctgtcggccaagctgccaccgctcgtccacctgctaccgccactgctcgagaacggcagcctccagggagacgtcgtctgcagcgagatgctcaaccggctgctcaagctcgggggctcgctccgcgtttcgaaatgggcgagtctccgccttaactagccaatctgacttaggacccgctgctgactgccatctgttaccctcgctcagcttgacgctccgctgccgatcccgcacggcaaccacctgctcgagtcggccgagctcgctctcgtccaggcggccgccctcgactcgtttgcgctctcgctcgaggcctttgcatagaatgaccaccttatgacctaaacgagtcagaagattatgacctaaacgagtcagaagacggcgccggtgatagcgagcgtgagcgagtatgagggagggagctggacgaggcctctgccgtcaagtgacaggtcaagggctcggtagcaacggcctcttcggaacttaaattcccctcgcccagcgcagcggcccatgccggtcgaccgtcgtcctctgcccttctcgccacaccaccaatcccctcacccatcccagctacactttcgtcatggcacccaagccaggaggacgcttcgcctcggtcaagactgacccccgcttccgccgggccaaggcgtccaagtccaaggtccagctcgacgaccgcttcaaggccgtcctcgatgagggcggggtcttcgcagccgacaacaagcgaggtgcgtgccggtgcttttccagctgtctgagctcgctacctggatggccagcctgcgatagtcctccgagagctgacgagctgcctgctcccgacccgcctcctagacaaggccaagaccgacaagtacggtcgggccgtcgcgagtacccatgaccgcgatcagctccgcaagttctacagcattggcgacgaggatggcaaggccgactcaaaggcacctgccgccggtgacgatgacaagccggccttcgtcgactatgctcgtggcgagggcctgctgtcgtcgtcggacgaggagtcgtccgaggacgaggccggtgccgccgccgaggatggcgacgaggaggacggccagttcatcgagctcggcggcgggagcaagcgtcaccgccgggcagacgacggcgaggttgaggtcaaccttgacgaggacgagacggacccgtcggcgctcgcgctgctcgagcagcaggctgcggcctactccgaggccaacccgcaggagcagacgaccgaaacgcacacgaagcggcttgccgtcgtcaatctcgactgggaccacctccactcaatcgatctcttcaaggtcttctcgtccgttctcgagctcggcggtggcagcggccggggcaaggtcgagcgcgtccagatctttccgtccgagtttggcaaggagcgcatggagcgcgaggagcgcgagggcccgccccgagaggtcttcgtcagcgagaaagaccgcgccgacgagtccgaagaggaggacgacgacgaggaccacatggggatggagcttgaggagggcatgagtgccgaggagggtgccgaggagctctctgagggcgcgagcggctcggagaaggaggacgatgaggacgaacacgaagacgaggacagcgaggacgaagccgacgaggacatcaacattgaggacctcatggcggacgacaagggagaggagatcgacatggacaagctccgggcgtaccagctcgagcggcttcggtgcgcacctggctcggcttacctgacaagggtccgcccggctgaccactactcccttttgtgcttcttccagctactactacgctgtcgccaccttttcgaccgtcgccgccgcgagctacgtttacaacgagtgcgacaacaccgagtttgagaggacggccaacattatggacctccgcttcatcccggacgagatggagtttggggacgaggcccgcgacgaggccgacgaggttccggctctctacaagggtctcgactttgttaccgacgtcagtctgcccagtgctttggccgagcaactcgaccgggccgctgactctgccccccccctccccttcctcaggccctccgccactcgtccgtcaagctgacctgggacgacgacgcgcccgcccgagtcgccgtcacccggcggaagctcacgcgcgaggagattgacgaacaggacttctccgccttccttgcctctgactccgagtcggataatgaggagtcgcggacgcgcctgcgccagctccttctcggcaacctcgatgagcgagacgaggccgacgcctttggcaacgacagcgacagcgaagacgagggcaacggcgacaaggctggcggtatggagatcacctttacgcctggcttgactgagaagggcgccgccggcgaggccgacgaggacgacgacaacatcacgacgctcgaggcctacaagaagaagatgcgagagaagcgccgcgtcaagaaggaggagcgcgagaagcggctcgcagaggacggcaaggcctcgtccggcggcgaggaggcggccaagcccaagaagaagacgggcaagatcgtcaaggacgcctttttcgcggccgaggactcgagcggtgacgagctcgacgccaatgtcgtccaggtcaagaccaagggcggcaagaaagccaagccgaccgacggcaaggaggcggctttgctcgacctgctgacgctgccatcgacgacgacgaccgcggccgaggaggctctcggcatcgaccaaaccaagcacttctcgatgaacgacatcatcaaggaggagaaggcggccggcaacaagaagcgtcggcgggcgccgcacggcaagaaggccggcgccgaccgcgagaaggaagtcgagctcggcgacaagaatttcgagatcgacgtcaaggacgagcgcttcagcaagaaactcgtcgacgaccaccgcttcgcgatcgacccgagcaacccgcacttcaagaagacgaaggcgatgggcaagctcctcgaggagcggtccaaggcgcgcgagaagcagtctggcccgcaagagcggacgccggcgtcggccaccaaggccatggcaaacggctcgggtggccgcgacagagagctcgacagcctcgtcgcttcggccaagcgcaaggctggcagtggcggtgggatggacaaggccgagggcaagaagcgccggaggaagtgatgcgtcatggctctccgccgcgaggaaactagcacaggtcatgcaaagaaagaggccgagcctacattgaaagcagagagcgaaaagtcgaaggtgatacgaagtcgtgaaggaggtggcgagccggtggttcgaagtgatacctgcgccacagaagcaccggaaggaaaggatcggatgagaaaataagaagtatggtgcgaccgggcaagcgccacctttcaggcatggcccttggcgttgacgtccttggagatcttaagccagccaagctgtccgacgatgggctccgtggcgagtccgccgccgacttttgtctcctcaacgacgtcgtcgtcgatgccggcgatcttgatctcgcccggtgatctagccgtctcaatctgtaggcccctttcgttgcacaggtgcagaaggcagatgaagcagtaggatgtcgataggtcgctgagcttgtccgacgggtagaccttctggagcgaatcgacgacggacgagaagacacgcggctcggcgtcctcgccctcgggcggcggggtcatcggctgagacggagaggggagttcaaagtcagtcgcgaatcgtagaagctaagcggttgagtcgtcaagcaaaagtgagtgggtcaagctgtcaaacgcacctcgtcgtcgtcctcctcgccctcgatcggcggggcgaatatctcaaggcccttccagattgagtccttgagcttcttgacgtcgacccgtttggcgcgcttcgtgtacttgacgtaatcgggccgcgtccgcttgaggtcctgcgtcccagcccagagattctcctcctcagttccgttgaggccgtcgaggggcgggatgctgccgatcgaggcgttgggatcgatcccaccgtcaaagccgccgccctggtcgtcatcgtcttggaagaattgagtcccgaagggcgctgggctctggcctgtgaagagaaagtaggaagacgtcagtcttgctgtcgaggacaacctcccaaagtaagactcacctccaaagccgtcgtcgcccatgccttcggcattctctcccatcgtgttggcttgatcggccgccgcctgagcccagaattgctcgtcgacctcgccgtcgcccttcaaatctaaaagagggcgcaaaacgctcggtcagcccttcggtcaggaatgtcgaaccgggacacgactgaccctcggcccgagcacgctcttgctttcgcatacgaagctgagggtgcggaaagtcggtcaggagttgagaggcgcagacgtggcgtcttgacgaaaaggcgcacagtgtagagcttcttggtgaaaagccgtaacagctgctggctcgagaaatgcaggtcttgcggcaagaggtacttgtcgcgctctttagcaagctcacgctcgcggtcctccttgatcttgctcttgcgtttcttgccagccggtgcggttgctgccttgcgatgagaagccagtatgatgccggtctgggttcctggagaaaagagctcgtcgtagtctgggactgtgtcgtcgtcaaagtcgatggtgaaggctggagcaatcttgcgaggagttttgggtgatccgtctgcgaggaaagagtggatgcgagagtcagtcccagttgtggactctgcattccgagcgaggccgactcacccttcttttcactggtagcgccaaagagcgcgccgccgacgacagcccggcggaccttccagtgctcggggccggcccagttcttggcgacgagttgccggtcaaagtagccaaacatgcccgccgcctcgtcgtcgtcggcctcgtcgccccgcatcgccaagatgagatccttgcctgaaggctggagggaagggttgtacgtcccgaagccagctgaggacatgctgaagccgccgttgtcgtacgagacgtgctcgtcctcgccaccatcggcgccgttgctctcgccgccgaggaacgacgggccgccgaagccgccagaggagtcgccaccgtcgtcgccggcgtcgtctgcaaagaaatcctcctgcccccccatgccgccatagtcttggtcgtgggacggattggcgtcgccgtctgcgcgtccggcctgctcattcaagccgtttggggttgaggatgagggagcggcaaggttgagaagcgacatgtcaaaccctggcacgcttggccccgccgcagaggagaacgtaaacgtcttgagggttgtcgatataggccttgagagcagctcgtccgggttggcggcgaggaaaggtagaaactttgccttgagcgcgtcaatggcgactcgggtatcagcggctctggctgctttaacgccatcgacgtcgccctcagcggcctccacctcgtcctcatcctcatcatcgtcaaggcccgcatcgcccgcgtcaaagacgagcttgccctcgccgtcgatgcccaggtggttcatcagtaagccgccggcgcctccctcgtcaaagtcggcgctcgtctttttgaacagcgggtcgaccgaaaactcgaggtcgagcttcttggtcgagattgaggcgaacgacggcgcgagcgtattggtgttgcgctgggtctgcaaggagagacagcaggggctggtcagcgtacagaataaagcccagagacaacgccgagccggaacgtaccttgcgcttcttcttgcccaactcctcatcgccgtcgtccccttcgctatcgcctgcctcctcggcatcctcaccctcgccgttccccgtctcggtgagaccgctgagcagcttgccggtctcgctcgcgacgctgtcgacacgcgacgtccaaatcttgacgcagccgtccagcgtacaggaggctttctgaaagttgatgcctggcgcgagacgcgattaaggagaagcagtgtgtcagggtgctgcagcactgaaggtcgatgccgagggcgggagcgcactgtcgtcgcccgggccgtttcgcaacagagtcaggtccgcaaagtagtcgatgagcgcgaacttccacgtgttattgaccgtaatcttctactcgaggtcaaaggagagggatggaagtggtcagccggttgccttcggagggcacatgctctctagcgtcaaacttgatggcggtcaccacgtcaccatccggtcaagtagccgctcgtagatgatgagccacccaagggccaggctagctgtaaccgagtgcgactacccgtcgaggaggccgtagacggggggatgaggacgcttcgagctaggcggcgccgcgcgacgccagcgcaagagacgagctcccggccgaacgaccggccccctccaagacacccgatcgagtcgaagcacggagagcggaaacgtacgttgtcggtcgccatcttcatccactcttcgaatttgaggctcatctcttccatgctctctcggctggcgccctcgacctcggccaaagggccgccgccagccgctccggcgccgccgaccaaggccgagagccggcgccctgcgttggccgacttgcggatgaggaggccggcagcgttcttgggcaacgccggcttgggttggggcaaagcgagcgatggccgggcctttcttcgttggccatgggcaggaggcggctgctcctttccgaaagctcgaccgctggcgacggtctcgttgaagtccgactgctcgctttcggacggggacgaccgggacgagtcggacacgaccggcttgcggcgacccttgggagcagcgggcatgtcctagaggaggagaaggagagaaggggaggtagccggtggtcgatggtgtcgtcggagggaagcgagcggcaagctgaacctgttgaccaaggcgcgacgcgtcggaggcggcagtcgaaaagaaataaaggcaattcatcggacgcagggcaaggcgaagcagcagggcatgagatacagccggcagcagtatgacggcgggcattgcagtcgagcgatggtccaggcatagctcgggcgggtgcaagcgaggcgtgagcctggcgaggcgcaagggcaggaggcgaaggcgattggacgcgcactcgggagtacgcgtcgcagacctttcgctccggcagccattgtctagaggtgaccgggcgtcggacgaaggcgtcgggctggcgctagtataatcttgaagacatcgtgtcgtgaacgtgtcgaagggcctcttctcaagctggagcgccaggcgagcaggcgctctccggatcgttggcgaacgacagcattggccggcgtctcgagggctcgacgggcgagtgctccgacaggtccgattgaacaaagtagtatcgtcagccgacatgtcggcctgctcccggggaggcaacattgtgcccacgtacgtgccttgcagcccagcgagcgagcgagcggaggcgggccatcaaccgccagcgagcctgatgctgtatctgcagatggacgagaggcgtttaaagtcagctgcttgccacgggtggatgcgcgaggacacgcgtagatgaggcgtacaagtcttggcctgaggacgtcctgatgccgctgcagacgaaacgtcgctcagtcgtcagccggaggattgactctgcactcgatacatccgcgcacctggaagctgtcgtcccgctgaagccgcactgggagcgactgcagtctcgagcgagggcagtcggagtcggcatttcgagacgccattgcgcacctgccgcggccgccagatcttggggccgccctccgccgctgcaagcatgctctgccgccaatggaccagccagccaacgactcgaggcacggcgaagaggaccgggtagtagtcgagggggaagcccatcgcgcggtagataagaccgctgtaaacgttttcgacagggggagattgcagctagcagtcagcgtcgcgctatgaaggggtcgattccgacgagagctgactagaacgcggaactcaccaacgtttgggttgaggtgccgcctgatgaagtcgtcgtcggcgagagcgacctcctgcagcttgagcgcatgccgagtagcggctcggggccggtcacggcaaacacttcgtcggccagcttgcggatgatggtcgagcgggggtcgtgctgcggcgagagacgaactgtcagggtcggagcaggaggcaaggcgactcaggttactcacagtcttgtagatccggtgaccgaagccgctctgtagtcgtacaggtaagaggagatcaacgtctacgcttgggagcgagacctagactgggtttacgcacgagcacggcctccttgcgcttgacctgcggtgaaagaaagcgcgatagggtcagatctgtccgaattcgcttgtagccggcagagcgcgaaccttcccgatgaactccgggactttgtcgacgctgccaatcgactggagcatgcggatgacggcttctttggcgccgccgtgaagagggtcgtagagagcggcggttgcagcgctgatgtcggagggaagaggttagccagcgaaaagagcatcaccaggactgcgaggaagagatacgcacgcaacggcgctgtaagggtcctcaccgatgctgccaactgagagagcggcagcagtgctggcattgagctcgtggtcgacgtggaggaggctgtgagtgggggtgtcagcaatctgccagctggcccggcgagagactcgaacgaacgcacaagaggatgttgatcgcgcgcccaaagacagggtgaaccgagaacggctcggacttgccgtcgggcccaactgcatcgccgagcttgtctatctggtaaagaaaggacgccgcgtacgagagcccgctcggcggccggttgaacggccggccctggcggatgcggtaggcaatcgcggcgagcgtcggagccttgccaatgagccaatagatctgcatgtctatcgcctggaggctcgcttcggatccgcttgagtagagcttttagccctggagcgccgggtcggcctcggcgtggaacgacccgagcgcagcgaaggacgagcggggcatggccatgggacgcgcatcgtagcggaaggcgccgatcatgcgctcgaggtcggtgtgagggaaggagtgcggcatgaccttaccctcgaacagagccttctcgcgcttgcccggctgcgggcggagagagggtcagggcgtgagctggcaaggcgggcttcatcgacgatatggtacgcaccaggtcaccgttgagcagcagttaggctgacttgaggaaggtcgactgctcggctagctgctcgatcgggtatcctcggtagcggagaactgttgcggaggggtacgtcgtcagcgtcggcgagctccatcgcaagctgagcagggcgacgcactgccggccccgccgtcgatgaacgtgatgttgctccgaacgacagccgtgttctgtaaggcggtagacaggctgtcaacgtcggagcgccctgagcaacaggggcaaagcgatccaccatgaagcccggttcaaagactcgcagcactcgcttctcctcatcctcggcctgcgagctcgaaccgacggcaggcagcttgagctcgttgaacgccgttgcggggatactgttgttggtgatcctggtaggtcgttcaacagggtaggatcagcagctgctggctcggatgagccgctgaggagagggagacgggctgacttgatggtgatcattcggccggtgcggtcgtcggccacgcgcagctgttgcttcgagtcgcctgcgggcttcgacttggcattctcgagcgcgccagcggcctcctaggatggggtgggcttgcccatggtgtctgtgagagtgagtgaggcgatggtcgtatggcggtagagggggtcagagggagcggcgacgctcagcccggctcaccggctcgcggcgacgtgccgtgccgagccggaagacgccggcggcgagggtcggggactttcggctcaagactttcgcgcgtcactttcgactttctcttgcaacgcctcgtcgatagagatcagggggttaggcagcgagcgcttttagggttactgcagcatcgaatagtgtaaggcaaggtcaaggagaggcggagcgaggacagagacgaacggggtagggtcgggtcggctgcttaggggtagagtggacggaggagggaagtcgtcgagagggggaagagaggcgcgagagggagagctacggaagagggaagcgggcacacggaagcggagggtgaaggaagacggagcggaagagacgcggaagagagaggagccaatgagacaaaggagagatgaaacagacgaaggcgggcgagcgcgatcaatgctagaccgaccgagcgaccgtcatcctgaaccagacagaggccaaggccggatgatcagagtcgaccgagccgggcccgagctcggacgaggatgagagaaaggacccgagtgaggtgcgagaaggacgacggggcgagaacctcgcgccaggcgtgaagcagcttgagggtgccggtctcgaccgcgccgccggacgagaggacgaagggacggaagggaacggagacccagcctgcgtacttgagggtcttgctccgagcggccagggcgagggtgttgtcgacggcgttccgggaccggagggcgagcgagagcgagaggtccgagtgagcgcgggcggaggccgaccgagcgtcctgcgaggcgagcgaaacaacagtaatgtcgatctcgcggacaccgtcgggaccggtgatgcgaaggtcggttcgaagctggctgccggggacaagaggctcgagaataacacgaaacttgatgtttgaggagagggtgttgttgatgagccgcttgacctgctcgtgtcgaccgagagcgaccggagcacgacccgagcaggcctcgtcgtgaccgaacggagcagcgtcgccacagtcggcgcagaagtcgagcgagccaggacagagcgtccggaagtgaagaccagaagcgacctcggcgtccgacagctcgagcaccgaccggaaggggacgacaccgagccaacgccgaccgaggaccgtgccggactcgaagacggtatcgcgctcgaggccgggaagccgacggaggacacgttcgagccgaggttagggtgtaacgggcatgcaatgacgaaggcgggtctatgaacgggaggcgaggagttcgagagttagacgagaggaggagacggaagcagaggaagggagcgcaacttagaaggcgaagaagcgagcacgcgcccggagaagtgacagagagaggaggcgggagaagagaccgtacgacggcatgagggcgcgccagtgttcaaagagggggacagaggcgggggagagggtgccggcggtagagagaacgagagggaagaaaggagtggcggtgcgaccgaggtacttggaccgcttctcgttctcgaccaaggtgagcggggcgagaaggctggaggcggcgagggcagcggcagggagggaggcgttgttgaaggtgttgctgcgccggcaccggctgggcgcagcgcgggaacctgggcgcgccgccagcgcctgacgaccgcccagcggccacccgggcgccacgccctggagtccgccggactctttcgggggggggggggggagaagagaatgcagactgcaagccaggcggcggatgccaggccgaagggcgacgtctcacaagagagcggtcggggcctcggacggtcggatgtttgtcgaccggagatccgctagcaagccggccgtgcgcacagggcccataacgggaagactttcctgtgacaaagacgacgggcggctctcgcaatctactgcaagggccgcgacagtccgtcatcgaccgccttacttcttgctgctcttgtagccgttgaaggcgaggacattggggctaccagcgggcaggtcgcccttaagctggtcgacagtcgcaagcttgatgagcgccttcttgagctcgaggggcgtgatgggcttcttgggcgtcggggcgacaaaggccgactcgaggctcgaagggacgagcgcctggaggtaggccggcaggagcgagacggccttctcaaagacgccggcctcggtgacggcctcggcagtcatgtcgaccgagttcgagtggaggccgaggtagtaggcgacgaggccagcaatgtggggcgtggccatcgacgtgcccgagatggtgttggtcgtcgtgttgccgccggtccaggtcgagaggatgttgaggccgggagcaaaaatgtcgacgcacttcccgtgattcgagaagtaggcgcgctcgtccgagagagtcgaggcaccgacagtgatggcctgttcggccgcggcgggcgagtagtcgcacgcgtccttgttgtcgtttccggcggcaactgcaaagtggaggccagatgagacggcagcgttgacggcccggtcgagcgcgggcgactttccgccgccgagcgacatcgaggcaaccgagccgacgtgcgacgtcttgccggtcgcgaggaactcggcctcggccagcttggccttcttcttggccgactcggcggcaaagaggacgccgtcgacgacgtcagacatcgagccagagccgttgctgccgagaaccttgacggcaatcacgtgggccttcttagcgacgccgtacttgcgcgaggcgatcgtgccggcgcagtgggtaccgtggccgttgccgtccttgtcgacgtcgttcttcgggatcgtcttaccccacgaagcgcggccctcgaactcgacgtggtcgatgttgatgccagtgtcgacaacgtctgcaatggagagaggaagggtcagctgtgatgttcgtggcggcaaagaaaaatgagcagaggaaagtgaggcaatgacgcacagacgtcaacgccctcaccggccgacgagtcgtactcatacttcgtgaaggtcgagagacgcagctcttcgcgatgcgacagccgggcgagaccctgttgagatcgggcaaaagaaggtggcgtcgaggtcagccgacagtaatggacgcaaggcgaggacaagcacgcacccaaggagcaccgagctcggtctccatggtcgtgacgaccgagtcgagctcgacaaagtcgacctcggcctggcggcggatgaggtcgagcgtctcggcgtcgaacttgccggcgtagccaacgaggtggtcagagtcgtagacgttggtgatggcatcgtcgctgtcgagcgagggcgaagcggcaacctgggccagatgggaggcgaggaaggtcgaaggcgtctggggcttgaggacgacgactggtggaaagagaggacggacgggttatcgagagaggggagggcgcgcgtggaggtgggcgagggaaggcgttgctaagcgaggtcagcgctgcagtctcacacgaccagcgggcactggtcaacatcggggcggaagaagaggcagccaggagaggacgcatcaacgggcgataggcactaaagagcgagtgacctcgagcggcgaggccatcgctttgggcgacgcggcgatctcgcctgccgagaggcccatctcgccgcagcccagtcgccaccggagaatgccgagcctctgtgcgatggccgacccatccaccctccggttcacccagctggcccggaacgacacatcggaagccacaaagcgggagaaagggagtactgactgtacgagcccttgatggcctccttgccctggtcgacggcgtgggcgacgaccggggcgagggccggcgcggccttaccgtgcgggtgggcggccgcggcgtcggcaaaggtcgagacgggcgtcgccgccgctagggtcgagaaggccgtggcgagtgccacgagcgaagggagggcgagcataggtgtggaagtgactggatggaaaggggggtgttggtggtggacggtggcaaggatgaggagggagatcggcctctctcgctcgaagcgggcaggcgagcggtctcggtgcagccggccgacgcgcagcgacacccggcctctgatccctcactgctcgctggatgaccgcttccgtcggcggccgtcaagtcaagtacgagctggacgcgcaacttagcaggactgactcgaaaagctctgcatgtgtgtctcctcagttcaaggggatcgcgtctgctgcgacaggcgcgaaggatagtcgtgcgggtgcgtcagcccacctttcttcgacgcctttcatcccagttttcccatacagacttgtaattctttgcctcaacatttctcggctgactgtcaaatcagctactcgcaagacggaaaggttgagatctggctacagagtactggcctcgagtcgtcctgggccgaccgacttgcaaatgccgtttctcgccgctcgcccgcgtccgaaccgttgaccgccagctccgccgctcgacctctaaccttgcacacccagacccaacctcgccagccctcgctcctccctttacagatctagcagcatgtcgagctcaacctttgaccccaacaacgctcagaatctcgacgacgtgcgtctgttttagccgagagaggctctggcgctgccgagccgtcggcgccgctacgagctctgacgacctggacgagctgacctcgaacggctgcctcctgctcgcactctgatgttcgtagattgagaagcagtacgtctggagcaacccgatacctcaatgctcagcatagcctcgacactaacccgttatccccattcgatcttaggttcgccgtcgccgtcgtcgagcacatggccgtgcgtcctcgttctggccgtacccgagcagcctgtcgtccagaagctcaccagcccttccttcctccctttgcaatcgcagacctatgagaagctcatctcgcagatcccgccgcggaagctctcgctcacgaagtgcgtgcgcgtcgcgctgcgccggcagctagcaccgtcaatcactctgcgaggggtgcactgcgctcattccagaccgggcgccggcaaccgatatcgcttctggcgtgttccttcgacgatgagagctgatgtaatgctcaaccgctcgtcgtatcttccaggctcgacgatgtcatcctaacgcacctcatcaaagagttccccgagctcacgtcggcagacaacaactacgcccagctgcgcaacctcgacgaggatgcgatgaagacgccaaagggcaaggagatgtggcgcaacttttgcatgacggtcggttcctctctttcaccgcgcttcggctgcctggtcgcttgtaggggccagtgaactcgctagctgacgagcgcaaggtctttcttgctccctctgccagtatgagaacatcgtgccggactacaactttggcacgctcatccgggccgactgcaccaaggactacgctcaggacaacactgtgctcggtcagtcccttccactcgccagctgtctttcgcggctccgctggcgcacagcgtggaggctcacaggaagactttcctgacgctgagcagcaagctgacttgctctcgcaactttgacttgtgcgatttcagtcctccgcacgcagttcctcgcaattgaggttcatctccgtcccttgccgtctccttgtcgcagacgcttagcgcgaaggctgactcgcttgcgactgctcctgcgctcgccagattgcccgcaacaagtacggcctgaatgatgccttccacgaggctgcccagcggggcgacttttgagatgaatgactgaaaaagaaagtttgtggcggaagcaggcttgcttctgtcggtcgggcgctcgcccaccactgcgcagtgcccgcgagggctgacccagttcagacttgcagacgaacgcggacgccccccgctgttctgatcaagaatcatttcaaaacggcagcgccggccgagccttgagcttggtcgtgaggagctcctgcgggggtgaagaagcaaagcaatcagctagtctgcgctgttgttcacgacgcctacgttcgaggcgaggcacaccttcttccaggcgtcgacccgcttctgcatgcccttcatgcgcgtctcgatctcctgctggcgcttcggctggttgcgctcgtggatcgtgcccttgaacatgatcttgcggccgctgcaagcaagagaagtgagggggacgaaggcgtcagagtaaggattagaagaggcgcgatggttctggaagctggaaagacgcacgcatacggtccccagcggtcgaggtcggtgccgggcaccttgcggtcgacgagctgctgggcgctcagccgctcaggcgtgaaccgacccgcgccccatcggttaaccttcgggacatactcgccgtgccaggagatggtcccgaggtcacgccgttcctttgcgccctcgggacccttcatggcaaacgccgtgatggagctgttggcgtaaccctcgggcgtcttcttacccgaaggcaggatgtcggtccatccgagccggcggcactccttctgcaggacgtgctgctgcatcgagttgtagatcggcgaggcaaacgtccgcgtgatagggttaaagcacggcaggaacggattgctgatcttgccctctggcaggccgttgtctgcggttggtcagggacgaggggagcggcggagcagaggcgagcgaccaggtcagcccggcgaaatctccggtgaggcgtctcttcagcagcacccagactgacacttgtgcgcatccccctcggtctccctcgtgtaccgcgcccattcgcgatggaggaacgttccgatcggcgtcttgtcgaaccggatgtccttcagctcgaggtgcggctggggcagcgtcgcccggtgccagtagggctcgacgggacccttctttatgaactccgggacgacaacctgcttccgacgaagcatgctgatcggaatcttgtcgacacccttaaaagaacaaggtgacgaggaggacgggcgtgacggcggtcagcttgctccagccggcttgcattggtttctacaaacgcacgatgcgaaggccgagcgaggcagcggtcctaatgacatccttgccagggttccgccgacggagggcgtttagggagaccatggcgcttgagcgggtcgagaggaggaaggaggacggggtaaggaggccggaagaccggcgcgagtggacggggttggcgtgcccgggctagagagggcctctaggattgattcgcgctgattcgagctcagtggcaagcggagacggtcctgttcggccttgcaaagcgaaaagacgaggtctgagtggaagggagcttgaggttgggaggacaggcgaggccagaaaagagcggccgagctggctcgagctcgagcggcggcgcggcagaggcgaggctcgagacgacaagagggtcgacctgacctggctcgctacgtcgaccgcctctcccaccttcttagcctgcaggaccagccatctagcagaaccagctcttgtcggtagctcttgacataaacttaaaagcaatgccaaagcgtaaatcgcgcgggcagtcgtccctgttcgcttcgctcccgcaggagcttcggcagacgatctcctcgagtctcgctacgacgaccatcgtcgcagtcccgccgcccgctacccaggtcctggcgggtcctgcacctagctctcctaaagccggctccaagcgcccagcgtcggatcccgtaccgggtgaggagacggacgttgtgatcaagcgccgtcggccgtggtcggctgaggacgagaagcgcggacgcaagcatccttgggactgcgaggggctcgtcgcacggtacgaccgagccaagggcgtcccactcgagctgcgcaagtgtgagtgccgcaccgcgtgcgattaggcctggccgaggtgcgccgactgacgcgaccgcgcgctgcaccctgactcttccagactatgcgcagaggcaccggctcttctcgctttacgacgacctcccgctgctcctcgaccacgagggctggtactcggtcacgcccgagcggatcgcaatccagattgcggagcgcatgcgctgcggtagtgagtgatcgtcgtcctctcgtgacgcgtcactagcgcgactctctgacctagactcgtactcggcaacagccgtcctggacgcgttctgcggtgttggcggcaattcgatagcctttgcgcagacgtgcgagcgaggtgagtggcgatgctggtcgagggcgctgtagcatcatctgacagctcagccgtcctccgcagtcatcgcgctcgacaacaacccaactcggctctgcatggcgcggcacaatgccctccagtacggcgtcgccgaccggatcgagtttatcctctgcgactttgtctcgtttgctcaggcgctcgtccgctcggccaagggcggcaaagccggcgcggcggatcgaccgctgcacggcatcgactcagtctttctgtcgccgccttggggcggcatctcgtatctttcgctcaaaacgaacccagccaacctatcgactccgacgcaagagtcctctccggccgtctctgcgacacctgaaggcactgcggccgacgccgacgcgcccgacgtctacccgctagcggccctcgcgccgctgcacggcaaggagctgttcagcctcgcccgggccatcacgcgcgacgttgcctattacttgccgaagaacgccgacctcgcagagtgcgctgcgctggccgaggcgggcgagacggtcgaggtcgaggaggagtggatgggcggcaagctcaaggcaatcaccctgctgtacggcgccctggctggccaggagaaggctactggcaatccatgatgcccgtctgccgttacggacgagccgagtgcaagcggtacgacatccagagatacaacagatcgtgtcccttcactcctgcactgcgactcgtgctgctcctcgcgctagagcttggccttgagcgtgaccggcgagagccgctcgtctgtacgatgggtgacaagcactggtcagcactgcaacggccatctctaaaggatctcgttggggcgacacgcacagttggtcgagaacatgtggtcggtcgggacgctgccgtcgtgcgatccgaccgcgcgagcgtcgaccatgtcctccgtcacctcgtcaatcgtccgcgcgccgaggagccgcatgttcatctcaaactcgtcctgggagggcgcaagaggattcagacgtcgctcgagagaggagggtcgtcgctcatggagccgcaccttgaggatctggaacgcatggttaacgcctggctcgccgtatgcgctgtaggcaaagatcagcggccggccaatgccaaccgccttggctccgagcgcgatcgccttgagaacgtcggtcgcgcgccggacgccgccgtcgatgtagacttcaaacttggctgggtcccagagctttcgtgctttgagctcgcggacgacctcgacgaggacctcgaggccggatcgggcaaagtcgagctgacggccgctgcggaagggaagcacagcggtaagtctggctgctcagctgccacgggagggtcgcctgtcgcagccgtacccgtgattgctgaggacgacgccggcgaggcccgcctcggcggccatgaccgcgtcctgtcgaaaggcccgagccggaagtcagcatcggtgggccggccagacatgcgacacaagacgactgacttcccatgtctggacgcccttaagcacgatcggcactggattgccaagacagagtcggcgtcagcgtgcagtacaagcctcgctcgagcacctctcacgcactcttcgtaatcgacttgaaccaaggcaagtcggcccactcgaggcccgggtcgatgaagctcgagatggccctcgccgcgccctgatctttttggacggcgtcgcccgactgaacgttggcgccgtcgccatctgcgtcgaatttctgccgcatatccttctcgcgccttcctaattgaggagcgtcgacggtgatgaagagaccctgccaatcggtcgaaaaggtcagcgaggggagccaagtataggttgagatgaggacacaccttgatgccccgcttctcggcatgctggacgatctttttagtcttctcgcggtccttgttgacatacctgcgacgagcggcaagagcagcggtcaacgccatcgcccctctcccaaaagcttctgcgcttaactcacagctgcaggaactgcgactggccgtcgatcgcaccgttgacaagctcgtcaaagctgcagctcgcaagtgttggaatctgcgaatgacagcggccgtcagtcctcgctctcgcctgcagggggtcattggagcggctgacaaaccatctggatgatgccgtgatttccgccagcacgagtcaggttgagctcgccatctgggtgaccgagcttgccgagggcctacgagagtaatagtggtgagaggttagcttgaagggggccggcacgagatgcacagccccgggcgcaccgtcgcagtgatgtagatgggcatcgagctcttttggccaaggatcgtcgtcgagtagtcgacgttcgtctgggcacaacgtggaagggtgggcttgttaatgcgatcgatcggagatgacaatgggaggacgcacgacgttgcgcagcacgcgcggccgcatccagacccggccgtaaaccccgcggttctcgcgcatcgtactctcgtcgtcggccccggacgagtagtacgcccagccacgagcgctcatcacctgccttgcgatcgactcaaaatcgtgcagcgagagtacctcggacaggggtgggcggagcgagagggcgagctgctgctggagctcgccggtcgagaggggcgcgaccgaggccgcattcggaggggcggacgtcggcgcattggaagagagaggctctttgacgaggagagggccgagttggagtgatggatcaaggtgctcggtcacaatgtcgggtgcgtgggcgagcgagtattctggcggcgggcgaagggggaaggtcgaggtcagcccgaggcaaggttgggcgccgcagcaggccggcggttcaagagcggctgaaaagaagagcctcaccctcagtcgcatccttgccggcatactggaggaggatcgcgctcccaccggggtgctcgtcctatcccgaccggccgaatgcgcaccgcgccgcgcagagcgttcagcaacaaagatcaacagcctcttcacacaatcgagtcggccagcagacgtacgagaaagtcggtcacgtcgtagaccttgcctgatcgtccaaaacaaggccgaatggaggtcagtcgagctgtagtggcagcgatggtggaggacctaagcaggtcgcgtgcacgccgccggcggtagctacgacccggccagccgctgacgcagggacggaccgtggacggtgatccagcacgagtcccgcgatgcgtgggctgcgagttcctcgggcgtgactccagacatgttgctgagacttcgagagaaaagaggaggtgaatggtttgggccggctgaagggcaaggggccggccggagtcgggccggggctgcccgcggcggggctgactcgtgggaacctgcagccgggcgaaattcagggcgcagggcgcagctcgaagcgaccttggctgagctctactgttccgacaccttaccctcgcccttcccccctattccactcctctcttcgaccatgtctgctgccgataccaagcccaagaagctccgcaagtccaaaggcgcgttcggcaaggacggcgtcgacccgcgcaaggccgctgcggccgtcgccggcgacgaggcgcctaagcaggacaaaaagcgcaaggccggggacgacgaggtcgttcctgctgctcctgctgccgaagaggccgaggaggctgccgtcggagacgacgccgaggccaagaaggagaagaagcggctgaagaaggagaagaaggcgtccaaggcggcgcttgctgccgctgcggccgagtcgtcggccccgctcacgcaggaggaggtcgccgtcgctcccgccgctgtcgttgtcgaggagccgacaaagggcaagaaggccaagaaggacaagaagaaggcccagaagacgacgtttggcgacgacgctgcgcccgttgccgatgcggcttccgcgagcgcacctgccgccgacgtgtcggtcgccaccccggtcgcctcgtcgtccaagtatgtcgctcagaagacggtcgacagcgcgggcgaggccttcctcgcgacccacgccgtcaccgtctcgcacccttaccagccgatgctgtcatttaccggcctgccgatctcgggcaagctgagcccggccttcaagggcttcaaggagccctcgccgatccaggcctgctcgtggccgccgctgtttgacggcaaggacgtcgtcggcattgccgagactggtagcggcaagacgcttggctttggtgtgcgtagtgtgacgcgctagccacttgtgggccctcggctgacttcaacctcgccccctcctcgcagatccccgccgcccagcacctgatcaacacggcctcgacgtccaagccatctggcaaggtgccctctccccaagtcctcgtcgtctcgccgacgcgcgagcttgcgcttcagacggccgagaccttgacgatgctgtgcgacctgctgaactacaaggctgtctgcctctacggcggcatgcccaagacggagcaggtccggctgctcaaccagaaggacctcaaggtcgtcgtcggcacgcccggccgagtcctcgaccttttgaacgacggcgccgtctcgtttgaccgggtcacgtacctcgtcctcgacgaggccgaccggatgctcgacaagggcttcgagaatgacatccggcagatcattgcccagacgccgacaaagggccggcagacgctcatgttctcggcgacctggcccgactcggtccgcgggcttgcagcgaccttcatgaaggagcccgtccggatcactgttggctcggacgagcttgcggccaacacccgcgtctcgcagagtgcgtcctctgccggacccctctcgtcatgcgcgcgcccaagctgacgcccttcgctccttcacagacgtcgaggtctttgacacctcgcgcgacaaggacccccggctgctctcggtcctccgcgctcactcgaaggagtaccagaagggcggctccaagaacccgctcaggatcctcgtctttgcgctctacaagaaggaggcgacccggctcgagcaaacgatcaagcgcgcgggtttcgccgtcgcgggtctccacggcgacatgggccagcgggagcggatggccgccctcgacggcttcaagacaggcgaggtcggcatcctcgtcgcgaccggtgcgtctggctcagcccatcttcctggcgcaagctctcgctgacctgcctgccctttgttcagacgtcgctgcgcgcggcctcgacatcccggacgtctcgctcgttctcaacgtaacgttcccgctgacggtcgaagactacatccaccggatcggccgaacgggccgcggcggcaagtcgggcaagtcgatcactttcttcgtgtgtcccctttttgctcagtcatcaatttgcgccgctcgctgacacgcacgccccatacagacgggcgagaatcacgagacggccctcgccggcgagtttatgcgcgtcctccgcgacgctggggccgagatccccaaggagatggaccgcttcccgtcgacgattaagaagcgcgagcacggctcgtacggcgccttcttcaaggacacgtcggacgcgccggcggccaagaagatcaagtttgacttttagcgggatttgagtgggatctagattgttttcttgctattgagtgcggttcttgtgcgagtggctcagatgtgtgggaaggcagggcagcgcatacaggccgcctcgcgcctcttctagcctatcgacagacaggcaacgggcatcttgaattccagacaaaggctagtgctacagtagtgtaagtcgacggacgacgtcgccctcacgcccccttcaacttgtacttgccccgctcgagctgccggaggtcgcgttcgagcccgtcgatccagagccggccggcgagcgcgagcccaaagccaatatctgggcccaagagccggctggtggtgaacgtccctcttgcgagggcgtaaagtgaggggaggaggccgccgatgaggatgggcccgcggttcagccagaaggtgatgagcggcgggcgctgtgtcggaaggatcgagacgccagcgagggcgaggcagaggaggacaagaagcaagagggctgatgtcggcgccgtgagtgcgtgcctgcagcggccgaggtcaggacccgaagaggtcagcctgtactctctcgagggaccgggaaggcgtcaagcgacggacaggaggttgatggcgagcaggctggcggcgaggccggcctgcgtccagccgatggcgactgccgcctcgcgcttgagctcgtcaatgacactgtcctgctctgttaagaacgagctcgaggtcaactccatctaggctgggcgagagacggagggagggatggtatgcgcaccctcctcgtcgagaacgacggcggcggcggacgcgcgctcggcctcctcctcctcggtcgacgatgcgaatggccggcgggcgtgcatctctcccgatgcgtgtacccggctggctggcggcggcgttaaggagagcggctgagagcaggcgtcccggtttcagaggagaggtcagggatgtcagggcgctggtcgctggcctggctgaccgtcagcctgagcgagcctgggcggccccgccctcgccctctgtgctgctgctgcgcccgagtccgtctctggcgcgcgggaaacgcccatgcgcgcggcggcgcaaacagctctggccgagcgaccgaccaaccgggcagagccttcgcccggccggcggaggggtcaggacagagcggccccaagcgggacgagaaagcgaagagggtcgaggcaagcaagagggagaaaagctcgaccaccaccactagaccctcgaccagccagcccgtcttctgttctcctcagcagcaccagcagcaccagcaccttcgtcggcagcaccgtcgtctgtcagcacgccgccagcgaaggcagctcgagcagcaagcagcagcaccagcagcaggccccgcggcgcatcgctcccaccgccacctcgcaagccacctcttccgtctctcgcaccacacctcccgaatggcctcgccctacccggccgcgtcggccggcccgtcggcagcggcggccaagacgtgtcaccactgcaacccacccctgacgttcgacaaggttggccagaagaaggcgcactaccgcgtgacgcatcaggtccagacgaccatcacctcgcccgacaacctcggtaggtgcccgctctctggcacacgatcgcgccaagagagatcgactaacccccttttgccctccatcgcgacgcgccgccgcacagtccagatcaagtgcacccggcacccggacggcgtcttccactgcccgcgaggcgactgcgtctttacgagcccggacccgacctcgctcagcggccactcgtcgtcggcctgcacccagccctggccggccgtcagctcggttccgcccgtcgcactcgtcgacccgagcgcggcgccgacgtacttccaggtgagcgcgacgacggccgccctcaaccagtatgcggccgtcgctgccgctcagcagcaacagcaacagcagcagcagcagcagcaaccaggaggctacgcgccgtcgctcttccctattcctgcccaggcaatgctcccgccgccgccagggagcacgcctcagcagcacgcagagtacgcagcggccgcagcagcagccggcagtggcctcccgccctcgttcgaaccgacgacggccgccgcccccgtcgccccgcccgtccggccaaagcgctacttttgccggcggtgctacccgcacctgcacttttcgagcgagctcgacaagaagcggcacattgacgagttccacgacggccgggcgcggaatcgggccggccagcccggctcggccgcaccgaccccgcctggaggcggcgagcagaccaagcgcaaggctggctccgagcagcccgacacgcccgacggctcgctcaacggcgacgcctacccctcggccaagaagcgctcgcggctcgacgtcggcagcgttggcggcgacggcgaggacgacgacacctctgacgagcaccgtgaggcgatgccccaggcccaggtgccgcggcctccgaattgcgtcaacccgccgccgccaaacacgacgcccgacgacgtcaactacgacgacgacggccgggcgtacaagtcgcactactcgcgcccgccgggcggcgtgacggtcgttagccgcatctactgggacgagctcgacggcgacgccgagaagtggaaccggccctggggctggcagtcgcagagcgcagcgctcaggcgcggaagggacggcgtctacgtcccgccgccgccgtcgaggatggacccgccgccgcacccctcacgccgccactcgcgctcgtccgagccgatggcactgccgcctgctccgggctcagcgtatggctttgccccgagccaagccgactcgatggccgatccgggcacggccgcgccgaccggctcgcggcgcaagtcgcgtgcccagccggaaaaggtcgttgtcctgcttgactacccttgtccgttctgcatcgtcgagccgccgtgcgactttgataccgagcccgagctcgacgcgcacattagcgctgtccatgactggcgggcggccgagcgggctattcgcgagcgcaaggagcgccggcaggaagctgccgccgccaaatctgcagccctcggtgacgctggcgtcgaagccgctgaggtcgcttcggtcgaggctgcgccaattgtctctgctatcgacgcggcagacgtcgccgctgctcctgcacccggcacgaacccgctgtcgacggctgagccatcagaggaggcgaccaacgctgccgccgcaccggacgccacgccgcctgctggcagcgacgccctcgcacccaccgccatggctgtcgatgaagccgacgacgagcccgaagtcgccccgtgtgagatgtgcgtcccgcacatcttctttagcaacgcggccgcgcgcgattggcacttcaaggtcgcccaccagcggctgacgcgtccgccgacgggtgagtctttgcctgtttgcctcgctgagagtcgacctgggtgcatgcgctgacactgagctcgtttcataggaccaccgacgccgccgcccgagccagtcacagacgagtcggacgcggccccggccctcctctccgagaccgcgcctccctcggccgtagtcgaggtcactacccctacgcagcccgccttcctctcgacgctcatcggtagcctctgcccgtcaaacgggacaatgacgccgagcgccgccgccgcctcgcccctgtcgacttcgctcatgccgtcgccctcggccgagcatcgcaagccgcgcatgtcggacctgcttaacccgacgatgacagtgacggcgcccgtggccgctcctttgcctgcaaccgtctcggtcgcggttgttgagccggcccatcaggtcgagactgcaattacaacgggcgcgtctgcgttcgtcgctccggaaacagcaccgccggttgccgacgccacgaccgccgcgcctgtcgcgcccttgccagcctccaccgaggcgccggtcccgccgaccgtcaacggcgagagcaccgtcgacgcacgggtcgagctctccgtcaattgaggcagcctgccgcgcctcgcactgagccctcttggctctctttcggctgccttcggccgcctctcccttcccttcgctcatcctcaccccactcggcttccctcctctgcgtcttgaccttctccccgcatgcctccacctcctcgtacgaccccctctcacaccgcatcgcatcttcctcccgcctctccgtcccaataggtcccttgtcgcctgcacgcacacacgaccgaccctcatgcatgtcccctccctccccctctttccttcactcgcccgcggccggcgacgtgaagggaggcgaagacgcatgacgaccattttgggacgacgcttaaagagcgcgaacagcctcacttcgcccgcagccgattcgctccggcgtgagttcgaaccttgtccccccttcctgtcttgacgtagcacacgagccatggatcatccgggcgcggcccggtcagaaattcagccgagctgcacagcacgagagcgacgctggcagggcgagaaggaaagagtaagacgacgacgacgacgacgacgaagggctgacgcctgcggcgatccctgccgagcatccgaaggcacgctcgctcgtcgggagtcggatcccctttcgctctatcggggcacctcgctcgaggcgcggcgaagggtcggaaacgcaggctggctgggctggcagaggtggagggggcgagcggccggcgaggaccccgcgtggcctgtcacgctcagccccggcacggcatcggcttcctctgctgagggcgtagcgtcagcgacgaggagaaggctgaaggcgaaagcgcgtcagccgagggagagcacggcaggttttccttcgaagcctggctggcgttactggctggctctgctactgctagagaaaagaggctgagcaggtcgggccctccttcggctctggttcggcccatgtcgcgctgggcgagtcaaaggacgagggctcgaacctcctgcgagaggcaatcaacgacccgccggaccggaggcgcgcgcgcgcaagcaagcacgaacgaacggccgagagctttgagcgacgccctccgaccctcacccctccctcccagccccagccctctttcctcttcttttcccagacagctcgtcgctcgctccgctccgctccgccccgccatgttcgagatggagcaggacgaggaactcgccgagctctggtgcgtctgcggccagcggatcatccagcccaagccggcgagctcgcgccgggcgagcacagcagcggccgcctcgttggccggcaagatcacgccgacgcccgtcacgttcaagcggtccaagacggggacgatcagggtgcgttctcctccccctgcttctgatcctgaacaagttttgaggcagcgaggcgagggagcaagggccttgccccagccaaggcgaacaaggcgggcggcccgggagaaagcagcccgcgggcaccggcgtcagtctgcgtccgggcggctggcctccccgtcgttccctcaccttgctcagccctcccgccctcggaggtcggtccgactgccggcagagaggaacgctgctcacgcaagagaacgcttgcctgcccgtctctgggacgagcgcgagtgagagaggcccacgcgctgacaccctcgccgccgccttcttctctccgacccgctcgcttggtcccggtctcgcgcgactcgcctctttcttcgcagggtaaagcgcccggcggtccgacgcctttccaggtcgccaacgccgctgctgcagctgtgacggctgccgtcgcgccgcatccgctcaagacgacctcgggcgggacgatcatcaggcgctacggctcgtcgagccgcgtctcgaccctgcccgcgcggacgcagcaggcggcggcgccggcgacatcgtcgtcgtccagcggcgagagcgtccaacctccggtcgcaccgccgccagcagcatctagcagcagctcagcgatgggccggtccgagtcgacctcgtcgtccgatgcgtcgcaggcggcgtcctcgtcgacggcagcatcagcagcagcaggagcggcagcaggcgcgcctttgcctaccccaccggcctcgttcaagacggctgctccgcccgccggggccgtccccaacgggacgtcggccgaggcgacccggtccgggagcgccgcctcgctctcgacctcgtcctcggcgacgacgcttcagcagaccaacgccgtcgccggcccgggcaagatgctttactgctcagccgagtgcgccgccgccgacggcaacaacgccgaccttgcctcgcacctctctgaggctcttcacctctactccccgacgagcctcgagacaccggcctggcacggcagcgccagcggccgccatctccacggccctaacggcggcagcctgccgagcccgttcctcgtcagcgggagcgactcggagtcgggcgactacttccaccaccaccgccggctccagcacctcgagcacgacccggcgacgggtgacccactcaagcagccgtatggctttgtcgcccacggcccaagcgtccggcgctacagcgcgcggagcgcgacaaccgcaacgacgacgacgacgacgggcagctcgtccgactcgctcgcgagcctctgggacccgtcggccccgcagcagcagccccaggcgtcgacgtcggcctcgtcgcatggcggcggcctccggcgcatgacgcccctccacgcgctcgcgacgccgccgctcgtcccgctctcaccgatcgcctcggtgcccatttcggcgctctcgctcgtcgctccgccggcgtcgtcgccactcccgccatcgacgatggtccacgcttcgccgtccatggcgtcctttgactacgccaccggcaacggcggccatggcggccactcgtactcatcatcgtcgtcgtcctcgcttgcgagctaccgatcggcctcgcatccgcgctcggcaggatcgacccacacggccggcggctttccctgctcgagcgtctcggccggccgccagccgtcgctccacagctcgtccttctcctcgactgcgactttcgagcccggctcggcgcccgctgccgccagcctctacgcgtcgtacgcagcctcgttccagcgcacgccgtcggtcgaggcccggctcgcctccttcggctcgccccggcggacgtcgaccgcgagcatctcgagcctccgctcgtcgcgcctccactacccggtcaacggcagcagcgataccgacgagggcggcggcggccgtggtcggacgtcaagcggcagcctgagctcgaccggccgcctgcgctcgcggagcagagcgaacgacgcctgcttttcagaggagggcagcagcgccgacgacggcagtggcttcggccgcgcgctcggcggcccgccgcaccaccagaccacaccgactggcccgtcgttgatcgatcgggcgcggccgcagagctaccgccggccgtcgaacgcgtcgaccgacggcaacgacggtggcaggtcggccgcttcgtcgtttgcggacgagttgcgcctcgcccagcagcagcaccatcgccaacgatcgacgcacgcccaccataaccatcaccaccacacgcagtcgcgctcggccagcggcgcgagcagcacgcgcacgagcatctcgcccccgtccgaccgcgagtacctctcgatggcgccgccccagtcgacggttcgcgtccgaccgcctcccgcgccctcacgcaagaaccaggacgcggccgccgacgccggctggagctggggcgcgaaggagaagatgtacgagattccgcgggtgacggcccatctcgacagcctcgtccgcgagggcgccgtcggggccatgcctccggtcgcaggcgccgcccagacgggcggccaacggaacggctcgctcggcaagctcttctactggggcgtctgaattccgagccggctcaattcatctctacgacctcttcccttcgcgacgccccacacactttctctgctctggacacttttgacgacccacctttttcttctatcctccgcgcgctacttacacacagacaccactcgcgcgcgtggatctcctcttcgctgtttcttcctcctccccactctcgcccttgttgtagacgcctctccctccacccccgtaatacaccgaccttgtcaaattgcacgcgcaggacgcccgccagcagagcaaagccgcagccgcatgctcatctcgactctaccgcccaccagccagtcgagccagccaaactgccggcgccgtcgcggtgcacctctcgcctctgcctctgtacgcccgctctcgtcgtcgtcgtcgtcctcgctgctggccgactcgtcgacgagcttcggttggaccggcttaccgtccttgtagtagcgtgcgtcctcgaacggcagccagttgaagtcgaagcggtcggcgctgccgtcaacgacagccgggcatgactcgatgtggacgatcgggtcctcagggtcctccgagccgggccagtcgcagtcgggttttgggcagagcgaaggctggcgagtaatcttgcgggggcgctgtcgagggtgagtcagttgagagtagaagagggaggacgctgcatacagacttccaaagagcgcgagcggctcgtcgttggacgactcggtgtcgttggcgccgtcgtcgtcgtcgtcgtcgtcgctctcgaccgtgacggcaagcttgtttctgctctatgaacgcgctgggtgagcagaggaggcgtttctcgatgtcaacgaattggtactgaagctgcgacaccctagagggacgcacaggcggtcgactgctggccctttgattcaccacgggtaacgcctggctgcagaaggccgccgccagcgcggaaggagccctcaacgaccggccacgggagcgcagcggaccggtccgttcccttgatgcgctcgcagatcctgaggtgcttattgaagccgtgtgggttctcttcccaaagctgcagccggcggcgacgcattcgaagtggccggaagcagagcgcgggatctcgtagactgcgcggaggagccactcgaggtcagcttctagctgatcgaaacaagcgttcagtagcaccgacctaggccgtcgacgaggctgtggaagatgtcccagtgcgtggtgcggtcgtgatggtaaagtttgtcgtcagagctgaacgctcggccgcagtccccacaactaagggagccgagcagcgcgcgcgactctgcaagaaagtggccgagatggagtcagattcaggcagctcgatagggatgcaggctaggaggctaggcgagaatgaggcgagattgagaggagaagatgaaaggtgaagcagtcgcgcgggaggggccgtgcgcgcagcaatcgaaggggagcttaccagtcttcttgcccttgccctcgcccttgctcggaggccgtgacgggccggcagttggctcggtttggatttcgtccacaacgagcttcggctggatcggcgagccgtcggtgtcaaagaggacgtcatccaccggcacccaagtaaagccggaccggtcggtcgtgcgggcgatgttccagcactggccgacgtgggcgacgacgtcgagcgggtcgagcgagccgcgccagttgcaggctgggttcgggcagcgaaagctgtggtcgtcttccggccggtcgacttggtagactgttgaagcacggccggaggagggttagacgtgtcggaccaagaggaaggcggcggcggcgggaggtcgacgaacccttgcacttgcccgcgaggtcgcaccggatgaggacgagcgaccagtgcttagtccgctcgtgcttggcgagctcctctctgtgtgcttggcgagctcctctctgctgccgacgacgtcgatgcagagcttgcagaagcgaggcatggcgtcaagagtggcggtggtgggggtcgaggagagcggccgggcgaagggcgagcctctcctctcgttcgtttcgcggagaagtgcgtcctcgttgcctcgccctcgaagtgggtctcttctcgcgggctgaccacattcgcaccttgctttcccctcaccgcaggggcgtccgccttcagggcaacggtcaggctccggttcacctctactgggaagagatcctcaacgactacctccgtacgggcaaggtgcggctgctctgggttattcgctgcgtggcactcgctgacaacctacccctcccctttcgcgacagttctcgaccgatttcatggttacgcaccgcgtaccggtcgaggactttgcggtcctctacgacaagtttgaccgtcacgtcgagggcgtccagaaagtgttcgtggagacgtgcgtcccgccttcttcatctcgaccgagtcttcgactcacttcgccctgcgcagaggctgactttgctcgcgcttgtctctcgcagcaaattctcgaacccgccctcgcccggcttccccaagacgacgcgtgcggccgacatctaaggtcgacgacaatagacgcaaatgcgacgtcggacgggacgacggcggtcgaagcgtcgacgtcgacgtacagtgagggatgagcgccgctgtcgggcgctcttccgcgtgagagggttgagagatagaaggtcgctgtagcgctagccgtcttttttgtagcttgatgagagattagaagagtgcagcttgaccatccgtcgtcgatgtggcaggtcgacgactcgcgctcgttgctcgctctcgtgtttggtctacggtgagacggccggatccgcggcggtgggctgctgcggatgatctctcgcggtgggctgagttcaagctgacctgctgctgcccttgtcgaccgcctcttccctcgacccaccacctcgtctggaactctcaaccagatgcgaacgaccctcccgctcctcctgctcgcgggcagcaccgtacacgccctgcgcatcccgcgttacatcaacgacactctcgtcgccgccgcgccgcccgagcccgccttcgagacacgccagcagccgactgtcccctcgcccgccgtcgcctctcatccggcggactccacgcctgccagccgccagccgatcttgcccggagacgacgatgctgttcttgtcgtcgtcgtcgagggcgccgagggcgagcccaaggcggaggccgccaactggtcgtgcgacgtccgggcgtgggttcgggcggccgacctcgagcccaactccttcaccgaggcccacgctcgtctcgccgccaacggcaccgactgcagcgacatcgagagctggtcggtcggccttcggtacaagcagcggatgatcactcgcctccagtacgtcgcatcgaccccgtcttggctctgctcgtccggcaatcactgacccgctaggacccttttcagcgctcctggcgcttcattccccattcgacctgtctggtcgcctgagctcgagtcgggcagccgttggaattttaacgaggacgtcgacatctttgatttcggcaaccgatggaggcgagggtcgtcgccttacgaggagatgatggacgagtacagtgagcgcctcaaagccctgttgagcgaggcagtcagtggcgcgagaatgacgacccttcctgattcctttggcagacaagatcatctcggacgctgcgctttgggaggtgcacgccgccgagcatgtcatcttcgactcgcagctagagctggcgtcgatcaagggttcgccgccttgctttcgctcagtttgtacgacgacacctgctgatgcccctccttcaaagatgttggcaactccttccctctcgaggccatcaaagcctttcaggtcgctgtcccaaacacgaatctccctcccaaggctgaaaatgacggattgtcacaccacaacgatgacggcgaggtgcgctcaagcctggctaaggcccttcgaccctttagctgacactctgcatcgccgctgcttgcagatggtcgagtcagagacgctcttcgaatactacttcgcgatgcgactcaagaatggctcgacgcttgacttccctgccggccgagcaagctttgtgcccgcgggcctggccgaaaaggacggtccggtcgagaccgtcgtcgtcgacttctttagtcagcgcgacggccaaaagcagcgccgctacgcggataggttcggctcgtgcggtgtcccggcctgcgtgcgtcgtcctcgtagagttgcttcgcttggccgcctcgtgcggcagctgctgacttggttgacctcgctttcgcatgctccaggatcagggcaatttcacgtcgttccggctggagctcgagatccctgccgcccgtacttttgccctcgactcaacgacgtacctgcctgcaacgctttacacaacctcgaacggaaccgagtacccctcaaacctgacggttcagaccggtgacgccaacgaagtgcgctggctcgagcagtttcctcgcgcgaccgacgccaacctgacatcgacaactagacggtacaacatggcgcacggcaggatgggcatgtttgtaggcgcggaagagcgttttcttcgcatcaagccggacgaggtcgagcgtgccgagcgcgagagctccagctacgggtactttggcagtctcgacgcaggccagctcgcgctcgacggacgcgccgccgtgcagcacctcaaaattcctgtccacatgtgccgcccaccctcgttctcatactcgaggttcgctttgctgacccgtcttcctccttccctatccctctcagcgattatcacaccatgcccgacttcaggacggcgtttgtcaactacgtgtcgtccctccgcctgttcattcagacccggtttgcctgtgatgaggcaatcaacacaccggtcaagattagcgacgatgacgacgctctctggacgggctggttcctccctcaccccgtctttgagcaggagcacttccggcgacaagactttgttcacgaggccaatgtctcgatcaccgtggtcggccctcctccttcggcgaccgctccaccgacgcactatctcgacgacggcgctcttgccccgatcctcaccctgccgggcgcaagcggtctcgtcttcccgctgatcggtgccgtgcgcgtcgaggagggcttggaggagctcaaagcgcgccgttacggacgcggctggggcggaagctacacgcgctggttccgccccgcgggcgagcacgagcacgccggagccgtctggcagcgctacgagaagtcgctcgaagccgccgccgccgccgccgccggcgaagtggacgaggcgccgacggttgacgttgcggtcggcgtctcgcctcggcccgcccaaggtgttcttgccgtcccagccgaagtcgcacagaccccagcctgatcaggctctcgtttaccacacgaaccttctctcctttgcggctcccggtatatagtctacactctgccagggctcgtcatccccttctccttccgtgctatggagtgacgtctttcgccagccagttgcgggcccctcctttgccgaagcgcgcctgcgagcctgaccaagcttcgacctcctcctgcaccttcgagcttcgactcacgcctcaacaggtctccgagactgcggcgcagggcacgaccagggagctgacacgtcctgaatggaggctggtgaccggctgcctgaagctctgggagcaaggtggaggcgagcagtcgagcgaacaggtcaaaacgaagtcggctcgctggctcaccttctcttctcatccctcatcacactcgccgctcgacctggtccgtcctctgcccatcctccgacctctcttccagtgcagctactgatgaaggattcatctcgttcgatccctcagcttgcttctccctttaccgctcttgccaccgacgcccccagccgacccgcctcgcaaccgtcctactgccatgaccgccgacatcatctggcctgcgcggtacacgccaggcatgaccgacaacttcgtttcaaatgaggtcatcgtcgcggggctttcggccgccgaggtttggtaggtcttctcaaaacctctcagagctcgacgccacaagccaacgacagttcggctgacagcctctcgcgctcacaggcccctcctcgccgacatcacaaagtgggagtcatactacgacaactgctcgcgaatcacgccgccgtcctcgggcccgttcctcgagcagggcgatgagttctcattcgccacattcggcctcgacccgctgccctcgcaggtgaccgagtcggttgcgccagggtcggcccccgacaaggctggccgactagcctggcgggctggaccaactggcgagggagactcgttcatcgaggtcctgcacgcatgggtagtcgaggatcttagcggcggccgtgtccgcatcctcacccaggaaagtcagctcggcaagattgcggccgacctctcacagcagaagtgagtcctgtgctcgatcatccgcctccccgcactctgactgaccggcagcccatcctcaggccgaacccgatgttgctaggccaccaggattggctcgatgggctcgtcaaggcggttcgggacaaggttgcctcgtcggcctgattttgcttcgctttgatgccctcgttcgacctccagcgctatcgatatgcatgccagatttgcccaccctgcagcgtctccgtgctcgtctggcatgttgcgagtgaagcggtagaagccgaccggggcagcaagggctgagtcaaagcggcgccgccgatggcccgggctggagcctcagggaaaggccaagcgccgtcagagccctgaagtgtgggcgactcgagctttgatcttaaagagcccttcgtcgagagagcagcgaccgagggtgcctcgttcgatgcagtggccgccccttcgctcgatgtagcaaggagccatcggcgtcagccgaccggagacgtcgagctcgactcgagttcggccgcattgcgcttccggtgatagtcgtccgaagtctgccgacagtcgtgcgcgtcgtccggcgccgcgtccgccgatgagaattcgagcttttgccgagcctctgccgtcccgtggttgtagcagggatgcttacgtgccagcacgccgccgtggcagagctggcatgcggccgggtcgacgctgccgtcttggatgcgagcaaaatgggcctcatgaaggccttgcgaagcacggaggcggtcggagaggctcagagtcagcctcaatcgtagctgtcaagactaagacgccaacgcacggccggccggccggacagtcttgatcgatccagtcggccgtcatcttgagcagcttctcgaccatctctcgctttggcccgtagcccggccagtactcgaggcacgcgacgcgaattcgactgcgcggccagaccccttttctttccgcctgcccgttcggcagttgctgtcttgtctcgtcctttcgaacagcaacgtgagcccagatggatgctgaacaggagggagacctgctgctcgggtgcgctgactgtcgccgggcgacaaagtctgaccgccatatctcacaagcgcacgccgcctgacgtccacgcggtgggacgagcagctcgagcagatcacatcgacagcagattgctcgtctctaaagccctcgctcggcagcgtcccaccactgggcgctcgttgggctgacctcgatcgggggcggcctgaagaacgggcagcggctcttaaaggcggcgagcgagcgctggcggacgatcacctcgaccgcgtgctccgtctcgtacctccgtctctgcaggcgatgggcagcagtaaagtcagcgaatgcggcggaaagcctctgcgatgcgtcgggtaaatgaggaacgcaccagcacctcgccctctgaccgaccgagatcgcgcctcccaggaagcctcgcaccctcgtccgtctcgacgccctgaagccggcccggccgcggctcctgcgggtcggggacgggtgtttcggccgaggtcgcgagcttcgagacgacatctgtgcagtagttgagcatcgtcgcgcggttcgtccatgcggctgcgcgcgatagagggaaggggggaacgaaggagagtcagcaaagggcgcgacgtcgacggaaagggggagcgccggcactcacagaccatgtcttcgaacaccgctccacagccgccgtcggctggcagcgtgcccgctcgacgagcctcgtcacgcgacatggcctgcgagcgatttagacggactggaggggacgaggcccgtgtcagcactcaacagcagacggccgcaaggagcgccctcgtacaacgcactgatgatcgagtcgtcgacctggcgccagttcttgatgacctctgcgacgagacgaaagcgtcggacgacggtcagctctccgatcccctcgagctgcgccgccccgatcgaccgcctgcccgacgacgacgcgggcgactcacgcttgaacaagctgatgtcgaggcacgtcgtcggcgagacaggcaggtttggagggctcagcgggtagtagacggccgaggagccgatgaccggcgtcgagccggtgctgctgctgccaccgacgctcgtcgaggtggaggcggcggttgaggaggtggacatcgcgtgatgggcgggatcggctccgttggcgggtattggggagaggtggacaagtggacaaggagatgattaggagcaggtccgatatcggacagtgtctgaagttgggtcggtggtggagagaagaaggagcagagcaagtcggaccgagctctctcgcttcgcctgcagccgaagccgcgcggccggccggcttggcttgggctgagcgagttcgctgcttctgcctcccataccgccatcccgctctcgagacctcccagtcacttgcccatcatgtgcgtgcctgtttctccgtctgattgtcagggtcgaggctgacgtcaagctgctcgtcccgccgacaggaaggcgatgcgcgacttcatctacggcaagccgccggccgagcagcttcaagagtggcagcggagccttaagaaggagcagcgccagctcgacaaggagatccgggacgtgcgttctgccctcctgcgattgtcggtcatgttgcgagttgctcgaggctacgattctgactaggcaacctcgtcctctctggcccgcccctcatccgaccgcatccctcctcccggcgtcccgtcagatctcggctgcccagcagaagacgcgggccgagctcaagcagctcgccaaacgcaacgacgtcaagttggcccggatgctcgcgcgcgaggtcgtccggtctaacaagcaggtcgaccggctgcacgtctccaaggctcggcttaactcggtcggcatgcagctcacgcatcagtcgggtgcggccttcgctcgctctggcgctctcgacttaccggggatagctagtgatgtttccctccttcctgcagcaatgctcaaggttacgggatcgatgcagaagagcaccgaggtgatgaagctcacgaacgagctcgtcaagctcccgcagctgaacgcggccatgcggcaaatgtcgatggagatgatgaaggtccgcgccgcctcccatcccaggcagaaggaagacgaggagctgacatgcgtccgcgctcgccttatatcaggccgggattctggaggagatgatggacgagacgctcgacgggctcgacgaggaccaggacgagctcgaggacgaggccgacgcagaggtcgacaaggtcttgtttgacctgacggacggcaagctcggcgttctgacgggcaaggtcggaagcacactaccagttcgtcttcccccctccgcctgacgcctcgtgccttcaactgctggcccgggctgacatcccgcttctcgcgcttggcagacgaaggagccgcagcagaccgaggaggagtcagaggaggagttccagcgtatgcagcgcgagctgcaagacctcctccacagctagctgaggcgctcctccgagcgcggacggacgccgagctccgtcttgggccgagcgaagcggacgaaaggggccgcgaggatcggcgcaggaggagcgggcgtggtctgcgcggatgcacgggggaagtctgtgctgggtcgtctctcgctgctggcggcccccacgtcggccgcggcctgcttgccctagcgagttgcctgaggcacgagatgggcgcaagcacggggcctcggtcgtcatgcgcttgctgtgtaggcgctggcccatcgtcgctcgtatcgacgctccaccggagcccaccagtcgacacgcgacgcacgcacgacgcccacatctatcgtacctcatcgcatgcagccctccagtgaggatttgagatcgcatgcccttcccgtcgtcctgccgctcactcttcgcctcgagtcgtcatgagagagcaaggacatgaatcgcctccccttctctcagcgtcatcggacccgcggtcgtcggtcaacttgcccagatcatccttatgatacgctccctttcgcgaggctctggtgtcgagcttagcggtacacctaaattgtcgtgcgagcagaaagacgaacaggggtcagcaatgtcagacgacgaccgacaaacgacccgggagggaagaacgtacgtggtccgcctggaggttggcggccagctcggcctccatccggtcgccattctcgagcagcttctccttgttgtagaggagctcctcgcgcgtctcggtcgaaaactctgcgttctgcgactcgacaatcgcgtcgaccgggcaagcctcctggcagaactgcgggagtggagatcgagtgtaagtcagccatcgagcgagcgaggttggagagagggagagggacggcaaagagcaggagggagaacgcacgccacagtagatgcacttggtcatgtcgatgtcgtaccgcgtcgtccggcgcgagccgtcctctcgcggctcgctctcgatcgtgatagcctgagccgggcagatggcctcgcacagcttgcaggctgggtcgtcgggcgttgacaagcagatcagccaccagcatgagggagagagggaaggaggattgcgagccgatcggccagaggcgtcggtggtggagacgggaacgcaccgatgcaccgctcctcgcccgacgggtagcgccggagggcgtgctcgccccggaagcggggcgagaccgggcccttctcaaaggggtacataatggtgtagggcgcgcggaagatctgctcgaagacgacccagaagcctgggcgggtgggagacagaggcggaaggcggaggtcagcgcgaggactggtgggcagctcgggcgtcgtcgcgaaacgccgatgcaagcgacaaaggacgagtgaagacgtacctcggatgaccctggagcaacgggacgagcaaaagagcgggcacgatcagctgctagcacgcctgatggtggccaatccaacgtctgcgagcggattgggtggaccaagggctgggctgggcggccgcgggcaggcagagatgcaagcccaagcgagagcgagcgccctttgacccagccaggccggccctcccctccgacccgtgccaacaccgcgctcagaaggcgagagtgaggggtacgcactcggtaaagaagaagagctgagcggccttgtcgagcgcgctcgggcccttcgagtagtccttgcccgtccagcctttgccgagctcgccgtagccggccttcggcggctggctcgtcaggtgcgtcgggccggtgtacgagtcggggtagtgggccgcgaccgggcgctggatcgaagcctcggcagggtttacaggcgtgatggcggccgtcttgggcgggagcgaagcgaggcgcgaggccgaccgggtgtaggcccgcttcagcgatgcccctccgccggtggtggtggggcgggcaaaggcgatagcggcgacggagcggagggcagaggacgggccagagacggcaccggagcctgctgcggccagacggaaagccagaggggacgcaggaggcatggctgcgggctctaagctgggagagaggagtgggtgagggacgaggacgagggccaatcgagcgagccgcaagaggttcgtccctccggcgccgggccgcgacttagataaccctagcttcccgcggccctcctcagactgacgactgttgctcggaacgatgatggcatgaaagcggactcattcaatcaagaaggcgagacggttacagaaaaagcggaagacgggctgctcagaggcggccacaggcgggcggcagacgtcaggggcactcagtagcgccgctgctcgtcctctgccaacacgaaacacgcgagagcgtcgagggggtcagccgtcggccagatcaaccgagtgcaaaaatagtgaggacgcacggtaagcgagaatctcatagtcctcgacgtgcgtgacgccgttgccgaacggaatctcggcgtcgcggtggccctcggtcacctcggccgggtggactgctcggccgccagagggtcacttttgtcagccaacggcgaggccaacgaagagcaaacggggacgagtaaggttaaggagaggaacgcacttccaccgccgcatggcgccttggcgacaaacaggaagttaccctcgccgtcccggccgccctcgaccggctggaaaccgtctggccggcagggctcgccccggtcgacccgacgccacgcgaccgccgacggctcagcgacgagcacctcgtacgctgccgatcgtttcgcaggacggaggagaacgtcagtgtcgggcgtgcgtgtgaggaagagagaaagagaggggggggacggacaggtcttgacgatctcctgctccttgtgggcgatgttggcccggccggcgtcgcgccacgtcttgccgatcgaggccgagccgtcgtggaacgcccgggcggcatagctgcgtccagccgggttggggggagacgagcagcgcatcagcaacttgttacttgcgagcgacgagccagaaggaacgtacagcggcgtcccatcctgctcctggccgacctgcagcgccccctccgggaagccgcggccgccctcgacgagcacccaccgaaccggagggagctttgaccgctcgagctggccgtacttctccgaccgggcacgtgcgccggcgaggaacgaggcctcgtcgacgtgcgcttccttccatgcctgtcgaacgcggcgggggggtccgagcgcgagatgaaaaacgtcagcgaacgacgacgacgacgacacgccagtcaagagccggaatcgtacctccttcttgtccttctcggcatgcttgttgtaagcccagatgccgagcccagccaggccggcgacggcgacggcgccgcctgtgatctgcgccgcgagcttgaactgcggtaaggggcaggcgtgcgggcagagggggtgtcagctcagctcagctcaactcgagcaacgcaagggagagccgagcgagtcggactcgagagacgcaccttgtccgtctcgtagctgtcccagccaaaggggcgagcgagacgccgtcagccttccaaaaaggacacgccagctctagccggggggtcgagctgagccgagctaccaggggggacgcacaacttctgcttctcggccttctggtcgtcgctcagctggtcgaaatcgtcatcgttcgtgtcgtcgaccgacgggttgccggtcccgtacggctgctgctgctgctgctgctgctggtcgtactgctggttcatcgttgcgtggtgcggggatgggaagggtgagatggtcggtggtggtgatggtgatggtgggtcgactgcagaagaaaggcgagatggtccgcagctcttgtaccctcgcaagcagcagcagcagcagcagcagcaccgccctggctctggccaggccgccaaagcaactcacgtcacgcgcgcacggggggcttggctgaggggtacgtcacttgggggtggcgcgccgcggcccgtcgcctttcgtggctgaaacccttgacgctcgaaaggggttctggagggcgtttgagggtcccgcgcgcgcgcacgagggcaagcaagcagcagcagcagcagcagcagagctttccctgactcgactcggcagagcgcgctcgtcgtgcgagcagcagggcgaggggtaatcatttttctacatggacgattttgcgccgggcatttggcttggagcgagcggtacaggcgtacaaggggagggccgggcggagcaggagcggaggtgcaggatggaggcgagcgcgggaggagcaggatgaggcgataggatctcagaggacttttcaacagcagcagcattgggggagaagaagggagggtcagcccatgtccttgcgacgagagagaaaagaacgtaagcagagacgcccgcgcgcgcgcgacgacgacgcacagtattccggcagcggccgcttggccgggatgccctttgcctcctggggcgcggcgtcaaacgtgatgtactcttgctggaggttctcgtcgagcttgaggatcgaggcaacattgccgcagcggtagcagtaactgcggcgggcgccggagggagaagggggaggaggggggtcagtgtcggtcatgaggaggcgcagggcaagcaaaagcagcagaagcggacgacgacttttttcgagttctgcaatgcctcgtctggcacgctcctctgtaccgacgtcgctgcccgtgggctcgacattccctacgtcgactatgtcgtccagtacgacccggcctcggacccgcgcgagtacatccaccgcgtcggccggacggcgcgtgccggcaagatcggcaagagtctcctcttcctcctgccgagcgagctcggcttcctgcgcttcctcaaggtggccaaagtcccgctcaacgagtactcgttcccggccgaccggatcgccaacgtccagggccagctcgaaaagctgattgccaagaactacctgctgcaccagtcggcccgcgacggcttccgggcctacctccaggcgtacgcgagctactcgctcaagaagatctttgacgtcaacgcgctcgacctcgtcaaggtcggcaagtcgtttggtttccctgtcccgcccaaggtcaacatctcggtcggcacgagcctcaaggcgaccaagaagcgcaagccggggcagacgacgtcggacgaggagtcggacggcgacgacggcgacgcggccgactcggactcgggcggcgtcgcccggccggtcgcttctggtggctacgagtcggatgaggagaaggggaccaacatgggcggcaagcggactagcaccgctcagagccagggcttccacggcggccggggcggcggccgtgggggtgcgtcgcgcggcggcggtcgcggtcgcggcaacgggcggggccgcggcaagtgaggtggatcgtatgcgagatccaacatgacttggctttcttgtttgcgtctggctgttgagcggtagaggcgaggtttaagtgcaagcgacgtcgacgacgactcaatgagtgaggggggtaggcgcgcagcaggttcgagcagctggcccgagcgtcggcgtccccttgacacccggcacctcccgtccatttactcccctgtagctctcgcccctcgcatgaaacctacaccagcgagtgacagctacagcagcgaaaccttcatttgcggccgctgcggctacggcgtcaatcagccgtcgcacctagccatccacccttgcaagctcgcggcggctgactgggaggtgcactacatctcaactgttcagggcgagggtccgtcgctcctgaggttctcctcaccatcagaggcatcacagtgggctgacggaaccctacctttctgcaccttctagtctacggggtgcctcggctcgcgtctggctcgtgggcttgtgccggttgcagccagactttctccagcgcgtttggactcgaagcccataccggcccttgcttcgcgctcgagcaggtactcgagctcagcaaaggcgactggcggccgatccggcagcctccacctgcggccgtggtcaaggtcaaagccgaggaggaggccgtggcgatcaaagccggtgcgtagccgccgcccagctgccagcagctcgtgacaaggctgaccagactcgcgccgacgcccgtcgcagaacccgattcgtccccagctcaggctccgacagacagctggagactattgccgaccctccccctgcctcacttctccctcgctgtcgagctgggaagggttcgagcgggacagggcgagcctgcgcccttcgctgcagtgtcgtttcgtcaaaggtcatcaatgcaagtggtcgtccttgctgtatgggaggaggccctcagactggaggagctgtctctgcgtccgtgagaggtgcctccagtcgtcggggtcctcgtcgtcgaacaggtcgactggatccagccgtcgggcgggcgtttcggccagaggggtcgccgcgggacgaggtgttgctgcaacgggttgggtcaccgtcgatgccggcgtcgccgcggcagacacggttaaggaaggaggctgaaacgtcgtcgatgaaacggccgctaccggcggctctgctgctgaggagggtgaggccggtgctagaggcgtgtctgccgatagagaggcatctgctgctggaagagcagccgccgtaagcgtggccggctccacttcggacgatagcccgcggtcaaccggcgtgggcttgcggcacccctttggcggcttcgctgtcgcgcggcgaggctttgctacgacggcccgggtcaccgtcgatgctggcggcgaatacgagacggtcggcaccgttgcggaagagcgctgaagcgttgtcgatcgagcggccacctctgtcggcgttgctaaggagtcgagcggggctggtgccggaggtgttcctgtcgccagagaagcgactactgccggggtagcagcttcgcctgccttccgcttggacaatggccagcggacgaccggagggggttcgcggtggacctttggaggctcagcttgccactccgacggaatatcagccgctggcggccgagagtagatggcccgcgcgggctcggatgcagccgtcggcaccagctcaggcgagacggccgacaacgggggcggaggaggtgcagcgccaaggaaaggcgtcatggctgcttgaacagggcagtgctggcgtgggcgagcacgtccgccggtggacctgcggcccagaggaggaggcatcgacggtggggatggtgcgaagggctgcagccctcggtaaccttttggaggaaccggcgcccgcgatgccgtggctgtcggcttttccacacgcgtgtgcgtggcgctggcgaccggcgatcgaccggccagcggcctgggagctctctccggcgccgcaggttgaggcgagcttgaagaaacgatcgagctggcagaagagctccagcgcgcctttggcggcggaggatgtcccggctgatcgcgcagggcgaccgtcgatgagtcgggctcggctaccggaggaggatgagagatcttgtgcgagagtcgagccttcgatttgcccgccgcctcgaatgtggcctggaacgccagcagtctctcaagagcctttctctgcctgggcgtgagagacgagcgtgacaccgccaacagcgcggtcggacggtcggacgtgcctttgcctacagtgcgcgaacgcactcccttcggaggcggcgggaacgcaggcgctcgttccggttgagcaccgtttgctgggaaaggagcggccgaaggcgtccttgccgataccggcaatttcgacttgcccgcccgagaaggaagcaggggttgaggagcctcaattaacgcaagtgcccctaccggcggcgtcgacttgaaaggaagcaaaggtggacagggttcgaccgacggaagggtcgttgagatggcgtcggcagccgattccgaaaaaggcgttgtcgccttgacatcggccggcagagttgctgtctggcgccctcgcgttccgtgcttcgagcgagttttgtcgacggagttgttgtatagcggacgaggtggcttctttatcgcggccagaattcgattgctgaccgtagcggacgaggatgtatccggaggtagcatgtcggcctcggcgggcgcctcctctggtcctggggctgtcaacgagggctggctggcggccggcggaaaggccgaggaagggggcccaaacaagaggtaggacgaggctgacactgaacgagccgacgacgcgcggatcggaggaggcttgagctggtggcgataaagctttgagccggtccgctccgggaaggctatgcgttgtgggggcagaggtgcacaagacggcgtgccactcggcgccgggccggtagagttcttaccgtcccaggtcctcgccgccaggaaggaagcgcgctccttccgatcagggcacgtgctctccgtagcagggtcgcaaagagcgccctcggtctcgagatcgccgatttgcgacgggtggaagagcggagcgtggtaggccgggtcagaagtcttcggcggccagccgcgggatgacgctgcgatcgcagaagacgatgccggcggcggcggagaggcttgacgggtggcgaacgaagccgtagctgacctccttttactcagagtagtcgaggtggcactttgggccttcgaccgccgcccgttcgggtggttgaccgggccgtcgctcctcggcggcggggcggcgcggaagttgaagtcttccatcttctccgctcggggataatacaaggcgtcgagcgtgaccgacgaaggctctccgagggtcgggagcgtaagcctgttgctcatgcgccgccgtccaggcaactctgctcgaggcagggaggtgccgtgtcagttggcgttgctgggcagcagtctgccaagggggggagagacgcactgcaagcgcggcatcgtagcagcatcttgcccgtgtgctctgacgtcccctcgggagccgagagtctcgctcgaaagcgcacgcgacgagaggctggtcttgaggggaggagaggctgcgcgaggggacgcggctgaggccaagtcagcggccagctgcaatcgcgagccatgctgcagggaagagcagacgcacagtgagggtcgaagagacgacagtgggtggagccgcgtgcctaaggtgtctccagcacgtccgagtcgagttgcagaggtcgttgacggcttgtgctcagagggagctcggccgagcgagagctacctggcggcccctccgaagctagggttatcgctctcgctaccgactcgcacgagcgccgacgcttttgcgggctttcgaaaggactgtggccttcctctttcctggcaggtggtcgatcaatggccaaagagatctatagcgtgatggactgcgtctagcaagaaagcggtgacgggtgtagcaaaggctcaacgcggcgtcagggccggcatcggcgacgccgaccgcgacgagttgccggtgacgagcccggctcgggagcgcgagcgcgacgtcggccggccaacgtcgcgcgaggccgagcgcggatcgcgcgacattgagcgcgaggcctcgcgggtgcgggtgatcgtgcccgagtggttgatgccgccgaggacgtcctcgtacgacggcgggatcatgccgaccgacgtctcctcgccggagacgagacgggcgtctgcggtgaagggggccgtggtcagcacacgtggtgaggacggtcgacagaagaaatagaagctgggcgcacactgctcgctcgcctcgatggcctcctcgtcgtctactgtccggcggtgaggcgagggcgagtggtggcccgagccgactgtccggctcatgagcgagctcggcaacgggccgccgctgccgccaaacgccggagcagggaccgatggcccagcaatgtcgggcatcgggatgagccgcgtcgctgggctcgcgagccgacgctcgttcgatgtccggcacgtgcaggacgagacaatcatgtcgccggtgccgtcggccgtcagcgtcgagtacgacggcagcgcgatgaattggacgttgcagcggcactgttcgagaaggaatcgggaggggctggtcggtcagtgcttggttccctcgactgcaattcggtcagtgccacgcacgtcaagcacggtgatgggcgtctcgctgataaagggggcaaggcaacacgggaggcgatcagccgacgccagtctacaaatatgggctctcgccgagcccgcgactgacatgatgatgtcaaactgcttgcgcttgccctttgcgtcgagaagcgtgtcatcgccacgttcgacgcgaaagatgatcttgaggcagtggccgaccgtcatatttgtcttggcgtgcttggttgtaaagtggatgcgcgagttgcagtcgggcacctgaaggcttgcgtcaaagtgccaggggccgaccgggttgagcagcgtggccgcagcatcgtcaatgtcggcgccagcctcgagcgcattgaccgcgagcggcgtcagcggcgacgacatgaccgcatcgacagcgtcggacgtgattggcaacagcgcaggcaccaccttgtgcgtcggcatgttcttcaggccgagcagctggtgccgccgcactgcctcgtgccgggcaaccttcttgtcatatgcgtagtagtcgatcttctctgttgcgcgcggggcatattaaagcgacggatggtcagcgcgcgactcgtcttctttcagtcgcatctgacggaccctcgaggacgaccgagatccggtagaccttcatcttctcaaacggcatcagtcggatgctgatcggactgtggacggagggttaacagctagtcagttatcgcgcagaaccgaaaccagacaaccctcggaaacgtgacgcacatgctgccgccgatagggaaactcttaccgctgagcgcgacgaggtaccgcagctggtcctcccactggcgctcaacgatgacattctcgctctcctcggtgtcgtcctcgccagggcaggcgaccatccggacctccttctcctcaaagaggttggccgtcagcgcgccggaccggtggacgatcgccttgagcttgtagacgaccgacccaaagtcggcgtggatcgtcggcggcgtcgtcgacgggattgtaaacgagatcgggtagtggtagacgcccttcttgaactccttccagtggtgaccgtctggctcgtcgtcgtctacaaagaggccgaccgaggcgccagccgggttgagcaccttcagtccagcggcgcggccgcgcgtgcgtgaggcgcttcggctctctccgcccagagcgctctgctcaggcgaggctcggcggccacgagtcggcccagcaggtttgactcgactcagcgaggccgcaatctcctcggctgccggctgctggccggttggcccaaagccgccggtgcctgagccgccgaagcccgtgaccggcggcggaactgagccgtcgccgaaggaggtgcgtcgacttgtacgcccactcggtggccgagaagaggcacccgagggcgattgtacccgctccttgatgtcctgcgacattgaccgcagggccgacgtgacgccagcaaagttgaaacggccgacgcgcgagctggcacgcttggtgctgctcggacggctgccggacgatggtgcagcctgcagctcgggccggacaggagcgctcggggtcggcgggaagtatgaccggtcgcgcgaggaccgacgagaggaagtcggttgggacggctcgccgccactgctgctgtcggctgcggccgagatagagtgctggctgcggatcgacgatgggtgcgacgacgcggccgaaatgtggtggagcacgccgtgctggccgattggcgacccaggcgcggagggcagctgtctggcaagcagcgcaggcgaagcgagcgggggcgagatgacccctgagagcgcccggtcactcagcgccgtcatctggtgctcgttgagcgtgtgcgtcggcgagacgtttgccgtctctgtccgcgtcggggtcggcgcgcgcgagagctcgttatcggtgtcgttgtcgtcctcctcagctccgttgctagccgtcaggtcgtcggtgctgcccatggccgacgaggacgagttgttggtgctcgacgaggccggcgcgtgcattggcatcgagggccggatcggtcgtcgctgctcgcctctgacgccggcttcctcgggctggctcgattcgcggctctggtacgggctcgggtcggccgagatgattggactcaggatcgagtttgggtgaggcgcgccctccgcgccgcgcgatgatgcgatgccattggtggctccgtcagtctccgagaccgagcgaagctgcgacgtgtgcgactcgggcaggggcgtgtaggccggcgacggcccgcggcggtacgattcttgggcctcgagctttagccgtgcagcttgactgtcgaccgagtagtcgcggctgaaggtcgaggccgaggccgtcccgcgcgcgccagcgctacggtcgggcgagtgcagacgcgacggtacagccgagatgggcagcgcgctgaagcttctcattccggcccgcccttcgcgccctcggccgcgcacgtcctgctcgtcctcgccacagacgccgccgccaggcaaatccgacccggcaccaggcgcaatgagcgagactcgccggcttgaggggccagagtcaaactcgccgcccggagtgatggctccgctgccgcctccgccgccgttgcggccggtgccgagcccgcgcgccgtccgctggaactcctcgtcgtcgagcaggacacctggaccgaccgaggctgcccggcgactgtttgagtgggaccggtcaaaggtgaagaagttggtcgtcgactcgaagattgtatgctcctcgaagatctcggtcctgcgtgctccgatgcctgcgcgcgtgcaccgagaggaggcagtcgatagcgttagctccagctcacccgctcaaagaggagaaagaagctgagcagacgaaccctcgggccactcggtccgggccttgccctcgagcgtcagatctatccgcttgatccggctcggcttcgagaggttgagcgtgaggacaccgcgaagaagcgccggcggcccatcctcgcgcacctgcgctcgccggccgcgcgaatcctcgccctggagtcggcaggccagagaagggagagcagtaggtgtcagccagcgagagcttgccatatacgcatcatgggagcggctgcgacgacgagttgggcaggtcgttgcgctatcgcgatgggcgactggccggccttgctcgcgggctcgtgcttccctccccttccttctgctccggcgccgcctgcgataacgccctccgtccgccctgtctccgagcagaggagatgagcgggagcgggactgaccgtcgctgggccgcgcagaaagacctgaggctcggtgagcgagatgaccaggccagtcttgaccatatgtccgatctggccagggcggctggctgagacgggggcggcggcggcggcgagaggaggaggccggcggcaggcgcagctagcgtgcgaaggcggcgggcttgtgctttgatggagcgccgggagagggagttgcgcaagagcctcctgcagtcgagtcgagaagcaaggacagggagagggcgtccgagagggaatctaggctgtcgtgggtagagggcgagcggtccggtcggagggccgaagctgttgtcctgccagctccgaagcaccgcggcgcgccggacgctgtaagatgagacgaggtcggctcccgagcgagcggcctgttgacagccacgactcctcctcctccgcccagcagctcgcagcaaaggctggccttctccgtcacccttcacgaatcccagtccagctaaaatctaccagctctcctttcgtttcggttccgggctcgctctctgatggacggcggctcgacctcgacctcgacgacgctgaccgcctcgggcggcgtcgccccgacctcgcagccgtcgtcgtcgctccgtccggcgcgatccatctcgtcggccgtcgtccggccgctgtcaatgctgtcgacgcggtcgctgcatcggcgcgagtcggcgacggatggccagtcgctctcgctgccgccaacgacgccggtgagcgacgcggacccgtcggcgacgacgctcgcgagcctcccggctggctcgcgcgcatccttctctggcagtacgcgcaatacgcggcgcgactcgcgaggtctgcttgccgcccaggttgaaatgaactttgaagaggccctcctccggaccgacacgatgcggctgtcgtcgtcgtcgccggcgccgtcgggcgagacgcactctgacgggttgcgctcgtccctcgagcggtcgcgctcggccagccgaggtcaaagcgccgccctgccagaggagaacgatgacgagctgctgggggacctctcgacgaacacggtcgacgacgacgacctcgagtctggcgccggcgagctcgctcaggcagagggtgttgccgtcgcaaccgcctcaccggcggcagctgtcgctggctcgccgaacggtccaggggcggcatctcttccagtcctctccgtcggcagcgcggcggcatctacgcctgctcgcctcggacgcaagccgccgccctccgccttctcgccgccatcatctccagccgccgcagctccggtccgccttgcgtctcctcggccgtcgctctccgctcgcgacgagtcggggacgagaacgccgccttcgcagactgttcctttccccatcgccatctccaaccccagtcagcctggcatcatccccgcctccccgatcatccagcctccgacgcctgggcaactgcctccagacttcacccggcgaccgtccgacgtcccctctctcaggtcggccacctcggctaacgagcatcagtacaggaacgagccggctgcaggcttgagtgacataccgagaaccagatcaagcctcgacttggcgtccctggtgcgtctcgaaggtttgcaaaagccaaatctcactgcaacgcattctgactggtcattctctttggctccgcaggtcaaggctgagtcggcgagcacctcccctggaccttcgtctcgcgacaactcgtcgaccagatcgactcctcgggctgcaccagcatcgacctttggcggacacccggcggcggtcagcgacctgcctcggacccctcctaaattgggcagcaccatatcgccctcgacctcgtcccaatttgccgtagcagatggctcgctcgtccgatcgtcctcgggcggcgtcgagtcagatctgtcaaccgacgactgggagaagcttggactctcgccctcaacgccgaacgtccgaaccctggcgcccgacgccgtacacaagagccagacggcggcaacgcagacgacgccagcgcgacacatttcgtacgggctcgggtcgggcatcggctcgaccccgacggcgtcaaaccgagtaggtccggtcgagggcctcgggctcagaaacgacggcttccggtcctcgatcaagtcaaaggcccgcaacgccttttccaaaatgttttcgtcgccttcgcaggctcggaccgcttcctcctcgacctctagccaagggcctgcagccagcgggatgccgcgcaagggctcaccccggcacttcggctcaatgtcatcctccaacctagccgcgtccttcacgtcaagcgcgtcatcatcgaagattgacacggcggcttcctcggtcagcgtcgcccctaccaaccatgagccctcgggcctctttacctacgcggatgccgtcctaccttctcgttcgagcagccaccaaacgctggcgagctcgacccgagaggtcccgtccttgcccgagaaggacccgatatggacgccgcccatcctcgacgggccaacggctcggtctgggtcacagccgcttagaagcgcctcgcccgaaagacgagcaaccgagacatacagccagctctcctcgcttggaattggaatgcggacgccctcggcccgccatccggtccctgacttcaacagctcaacctcgcccaggagacgaagcatgtcggtctcggacgtcatcggcggcgagggatcgggtcgctcgtgggagtacgatgtcgaaggcctgctcgacggtatcatcggcggcaagtctccggcctcgcctcgacgcaaccttggccgaaatgccgtctcgacgtcgtcatctcccaggcagcccggtcaatcggtcttccagcggcagccgctgctcggcggtgagaggaccctgacgacgacgatcacggccggcaagggcaagtcagcccggtccatcgtcggtagtgctcaacgagtcgtctcgccggcaccgcctttggcaccagaggtcgatgttccactcaatgttcaccggccgtcggtcagctcggtccggtcttacatcgacctcgacatccaacgccgcccctctgtggcgagcgtcgcctctgagcgcagcacgccccgcccagacaaccgtcggtccgtttcgcccctctcttcggccagtcaatcgaccagatcgctcgccgatggcctcacctatccgggctcgtcggactcgcacaccatccaggggccgccgggaggccatctcgcgtctgccgtcggtacgctttcaaccatcctcgcatcgccctctggccagtctttcggatacgccagctcgccattcgcagtttcgacagactcatcgagaatcgcgccggcgacgtcaacgacggtcctgacagtcgacctcagcgaggacctcaatgacggccctcctgtcgacgatgggcgagattcgtctcgcttccgcggacagacgatccgttttgtccctgcttcgccctcgccccaactcccgccgctgcccaactcgtcgccaatgccgacaccatcgaggttcctcttgcgccgctccggctcgggagaccagccaccagtatcgtcggtgccggagcggtcgaccgcgacgtctcgcccgcttatcgatcagctcgacaatgcgggtctcggcatcagcgccgccgagccgagcgggccggttgtgctcggcgaggagatcaaccttatgacgaccgaagacgaggcggccgacatcgtcaaccgtatcctcgcaggggacgattcgctcaaatggctggccgagaaccgggtggccgagttcctcggtagccggtcagtgcatctgttgacctcgagtgctggtcgctggctgacctctgctcttcgcttgcgctttggacgctgctacagaaaccgtctcaaccgcctcgcatgtcagctctacatggcgcactttgactttgctagccagaagctcgacgccgccattcggtaggtctccgcgcgagccgatcgtcctcagtaaggctgcgactgactccgacctcgcgccctttctccggcaggaccttgacttccgagctctacttccgggccgagacgcaagagctcgatcgcatcatcgagagcttcagcgagcgctacttttcgtgcaatcctgcggccgtctatggcagtcccagtaacgccttccgctccagccgcttctgaagccagacaggccactgacgctgcgctctcgttcgccaggtgtcattcatcaggtcgtttacggccttcttctgctcaacacggacctgcacgtcgccgatcacgaccgccgcatgacgcgcccgcagtttgtcgagaacgtccttagctcgatccggaccgagatggaagccgccgacaagcagtcatcggcgacggcggcggcgctcctggtcgcatcgcgaccctcgctcgacggcgcatcgtcgagcaaacggagctctaacgtcttatacgaggcctcatcgacggctgcagccgacagcgtggcatcgctgagcgactcgcacgtcggacagacaggcagccctcgtgctcgtttgtcggtcgatctcccgacctcgccggctcttgctcgcaacacctccgcgcagggcagcacgtcaagcgcgccggcgagcagcgcgatgacggccgtcccgagcggcagcggcgtcgcctcggaccttcggggcttgatactgcgcaaagactcggctgctggcttggccggctcacgcacctggttcagcgagatggacaccaccttgagggtgagcttgctaccgccttgaacagccaaaggccgctgctgacgttccgccgacctacaggacctctactcctctgtcaagtcgcagcagatcctccagccgatggacgttcccgatagcacgaccgatgaccgtcggccatcaatgaccctctcgccctcatcgcagtcgagcgtgacgcggtcgcgaagcgtgcggaccccatcctctacctcgatcgtcaacaagcggtcgagcatccgcggctttggcgcgttcggcgcctccctcgcctcgattggccaggcgacggcgaccagctcgtcttcaggcggtcggctgagcccgacgccgacgttcgcaacgtcgatgcacgaggtgagctgctgttgctccaaacgacgaaagctgtgcggcagcgccctactgactacgcccttcctcgcgatcagggctttgactcgccgggacagaaccaatcggctccgggcttcgcctcaaacctcaagcacacggccatcaacgaaaacgacagcgagtcgatttcttcgtcagtgtcgtcctcgaccgtcgacgacatgctcgacgaggagctcgccctgctgggtgcgccctgggccaaggagggcatgctcgcacgcaagctctatcacgacgtcgatggcaagcgggtcaaggacaaggcctggcgcaacctctttacggtcgttggcgacggcaacgttcagatgtacacgtttgaaaacgcctcgaccgccaacaaccggaacacggtcggcggcggcaactggctcgttcgtcccttctgctacgtcgcattttccgcagatcaccgctgacagcccagcttcgctcgaattggctgcagtcgaacgcacatctcgtcgacgaaatctccctcgcacactgcattgccaaggttctgccgccgccgggctacaattgcacgcgcccgcacgtcttcacgctcgaccagccaaatggcgcccagtcgttcttccaggtcgggaccgacagccttgccgacgagtggacgtcgacctgcaactaccgcgccgctaggatctccaaagagcccctcaccggcggcgtctccaatatggagtacggctggggtcggcacacgctggctgagccggccgacggcgcgtccgtcatgagcgcccgccggcgcatattttcctcggcgcctgccatcatggagtggaagccgccccagcagccactctacccaagtcagctcgacgaggagacgcagctcgaccacctgcgcgtctacgccatcaagctggccgccgagatggaggagcacgtctcggtcgaaaagtacctggtgcgcgcgcctcatcctccgcccttctttgcgtcgctgactcaacgcccgccttggctcaggtccccgttcgccaaccaaacggtctccgggcgcacgacaactaccgccgcaagctcaagtttctgcacgaggagcagttcaagtaccagacgtacatccagtcgctcgaggacggcttgcggcttcgagtgcgtccttcgcgtcttgcctgccctcgcgcctggcactcgactgactgcgatccatcctgacggccagctcaccaagcgcggagagatcaagctcagcaagacgctcgacaaggccagccggcggtctgcgagtcgcgacgactgacgacgcctcgcactcgcggcgcgcgcgcccaacgacctctcccgtctctcacccttttccctctctcacgtcttcactttgcccccctgctcgagtctcctgggttttaaacgctttctaaatcggtcatgcgctgctttcttcaacgatcttgatgaccttcacgccccccccccaataatgtcgtcctgtcgcaaggccactcactctgcagcagccccggccgtcaggagacaagaaacttctgttgacagccacctcccatcctatagacctccttgccagcctactcagcttccttcattcaaacgcgatgaaccccatccgccgcatctcgtccttcatcgcatcaggtagggcgagcgacgagctggtggaccggccaggcggcgcggccgtcagaggccaccagccgcggtcggcttcactcgacctccctcgaccgagggtcccgtcgccggccgaccgtccgggacagggctcgagcggccgacatatcgagacgatgcgcttcatgtcgtgcgtccttggtgaagtcttgtccgggttccctttgccctgcgttggctgacggcttggagctcgggcgctcgccgtcgacccctttccctgccagcgcggtcaagatcctctggtccgtctcgacgtcacgttcccttcgctccagcagacgctgactcacttcgagtaccgtaggttcgatctcaacacgcacacttggtcggcctcagagccaggcttgctccggctcgaccagtcgcttgagagcggcatgacccgcctccgggcagcctcgaccgcccccggccggagcggcctgccactcgtcaactgctttctgacgccgaggatgcacctcgagctggcgcagacgtttgcctcagcaagccggtttgaacgggccttcaccctcagcacggcgaacggtgcgacgaggaggcgttgccggctccttcccctgtcgtacttagtgcagtttgcagcctgacccgatccgaccgaccatctcctcctcccagactggtcgacgggcgagtcatccaaagagctcattgcgatcaagttccagaagacgtcctgtgcgtgccttgtcgccctgtgtctatccgcgatcgcttgctgatctgcttcatgaacgatggctgctgcgacctgaagccggcgtcaaggcggcccgcgagttcgccgccctcttcaacacgtaccgggacttcaacgtcaaggtgcttgaggatcaggagcgcaggcgactgtaccacgcccaggcttctctgcagcggcaggagcctagcgcgaacgaggacggctcggccaaggcaacgggaggggttgacgggactggaggccaagtgggccggcatgactcaaacacatcggtcagtagagcgtcagctattcagtgacctgcaattcgacgtcagctgacatgggtcctcaaacgcatatgactgcggtcagcagcagatgaacagcggcctctgggggttcgtcggccggcggacgagcaaggcgcgccgtgactccgagccgcggactttccgaccgcagacggcgcactgagcgaaggagtcgcgcgactagcgtagggtcgtcgtcagaagatgccttcggctcgagctatcgaaggaggagacgggaaaggcgcaaggtgcaagcgagcgacgccggaaccggatcacggtcggtcctgtaaggaggttacgcgcgagcagcgaattctttgtgcggcgccgttcgccggccgccccgccctctccctcctcctcaagcacacccgagatctgtcgttcgccagacctcgccccaccgcctctccccttcctcccattcacatagtttcgacagcacacgatggctcctctttctgcttccaaggccaaggtgcgaacccatcctgcgtcggagcaaggcacgcggcctgctgccactgcccgggcccgacctcgtcgccgtcgtcgggagctcgactcagagactgatgtcatttttcgccgctcctcttctgcctcgctcgctcgtccgcctcgcttgccttgctgcccgcccatttagcgtctggcggagaaggtacgtcctgagccgccgcggccttttgttccaagagagcgtgtgagctgaccttgaaatgccgctgctttgcaccttccctctgcgctcgctctccttcgctcgtctggctgcactcccactcaggccgctaagggcgcctccaaggagggcaagggctcgtcgacgactacgccctcccagtcgacgacgtcgacgccgctcaccagccggtccgccaacgagtcgaccgaggacctctcggcctcgctctcgatggccaagctcaacgctgccaccgaccggtgcgtccagccagccgggctgcatgcaaggcaggagctccagggctgaccgcgtttctcgttcgtccctcaggtccgccactggtgtcctcgcctcggacgctaagggtcgcgacatccggatcgactcgtactcgctctcgttccacggccgcgtccttgtcgagaacgccgacgtcaccctcaagtgcgttgtgcccggctgatctcggagctgttgtcggccgagactgacgagcgcgatctcccctaccgcagctacggccagcgctacggtcttctcggagagaacggctgcggaaaggtcggtctcccgcctttcgtcctgcttccttggggcggctgctgacgacggcggcctctgctctcttcgttcacagtcgaccttcctgcagtcgatcgccgagcgtgacgttgagatccccgaccacatcgacatctacctcgtccgcggtgccgtcgagccctcggacgtcaacgccctcgactacattgtcgcctcggccaaggccaaggttgagcggctcgagcagctcgctgaggacctctcggtcgccgacgacgtcgacgagctcgcgctcgaggccatctacgagcagattgaggagatggacccctcgatgttcgaggccaaggccggtgcgatcctccacggtctcggcttcacgacgacaatgatggccaagccgaccaaggacatgtcgggtggctggcggatgcgtgtcgcgctcgcgcgggccctctttattaagcctcacctgctcctgctcgacgagccgacgtcgcatctcgacctcggcgccgttgtctggctcgaggcctacctctcgacctacaaccacattctcatcttcgtccgtacgagtttcgctcatcttctccccgcaagcagacgactgacgacctgttccccaccccctctcgcagacctcgcactcgcaggacttcatggactcggtctgcaccaacatcatggacctgacggtcgacaagaagatggtttactacggtggaaactactcgacctacgtccggacccgggccgagaacgagaccaaccagatgaaggcctacgccaagcagcaggaggagattgctcacatcaagaagttcattgcctcggccggaacgtacgccaacctcgtcaagcaggccaagtcgaagcagaagatcatcgacaagatggaggctgccggcctgatcaaggaggtcgcccggccgaagcagatctcgttcaagtttgaggacgtctcgaagctgccgccgcccgtcattgccttctcggacgtcgctttcgcctactctggccagaagaaggactacctctaccgcgacctctcgtttggtgtcgacatggactcgcgcattgccatcgtcggcgacaacggaaccggaaagtcgacgctcctcaacctcatcaccggcgacctgacgccgaccgagggctccgtctcgcgccactctgcgctcaagctggcaaagtactcgcagcactcggccgaccagctgccgtttgacaagacgccgctcgaccactttgagtcgctcttccacgccaagttccccgacaaggacatccagttctggcgctcgcagctcggccggtttggtctctcaggctcgcatcagacgtcgcccatctcgcagctctcggacggcctgcggaaccgcgtcgtcttctcgcagctcgcgatggagtacccctcgatcatcctgctcgacgagccgaccaaccacctcgacatggagtcgatcgacgccctcgccgccgccatcaagtcgttcgtcggcggtgtcgtcatcgtctcgcacgacttccgttcgtccctcttccgccaatgtgaccacctgcagcaactcgctgacgaccaccacttctccgcttgcttgctacaggtctcatctcgcaggtcgctgaggagctttgggaggtcaaggacaagcagatccagaacctcaccaagcaggacctgactattgtcgactacaagaacgccctcgccaagcgctcgcaggccgccatcgccaaggccaaggtgagaccagtttgcatgccctaacagcgtcgtcgctctctgctgacgctactgctgctcatccttccttttcccagctcggcggcaagggcaaggcgtaaatcgcctctccacctcatcgcccggtccctcatctgccgatcgctcagccagcgttcacttcttcccgctgccgctggcctcatacctcaccttctaccctcgcccgtccaattagaccagcggccgtcttttgcgtgcgacgacgacttcgacctccattcaaactgtatgcaaaaacgcgctcgacgcccccgcctgccgcctccttctttcccactctgtcatggcctgctacgtaattgatgcgttgccgcttgattaccacgcgcctgctttcgtcaagcagcaattagcactttacgcctcgtgatacccctgcttgcctcggaaggcacgactcggcacatgcttgagtggcctcgcagatgaaggaagcacaactacttggcgcggatgcagaaggcgagcaccagccaccgtcaatcaacgcccgcactcgtctgctttcactagaaggctgcacctctttcgagaccggcagacggaacattctgctggcgggacgaaaggcgtctcacgcacgcccgcccgcctttgacgaggcgttctgatataggcgccgggctgttttcgccagggcgggatcaacgcataggggagactgaggacgcggccgcttttgtctctgacggacgacgttcccttttccgtctgctgccgttcaggccgggttcgccgtcgggcccgagcttggcaggtcgccgatgaacgacggacccacctggaggtcgcgtgcgtcaaacattcatgatcgagctggcggggagggagcaacgcaggaacgaccagcaagcagggacgtgctgatcgaccctctgcctcaaaccaacagtcgccgtcacccggcagatgcgggatcggacagtctggctagcggcagagcccgcgacgatccctttccgtcgagcgcttcactcgcagccccttttcgacggtgacgtcgcgaacctgttgtgtgcaccccatgtcttgcccatgcgcttcgaggacgggcaggcgagacggcgcgaccctgcgagaggggaacacttgacgcgtggaccgttgagtctggcgaggtgagtccgcgcggactattgtccgagggtgaaaggggcgcctgctcagtttcgggaccgtctgtgaccgagagcatagcgccgccagagttccttcacaaaggaaagtcgtgtggtgtgcgttggcagagctctcctgcagcgattcggcggccgtctcgcgtagaggggcgtctggcctcgcggggacaagcagagacttcttccgtgcccacgcagcgccgatggctcgcccgatgggatactgcgggcgtcgcctctcgcatccacgcgtcgtgagctgaggtcggttcagaccgcgaggccggcgtccagtacggacgcagatgcccatctgaggtattgacaggcaaaccgacagaccgtataacccgtctctctgggtcagcctggccgagcgagtcggtcacgtaaaaaggccgcaagtaaaaacgtcagtcggccgaagagggcgtcgcgcgcgcgccgaaagcgtgcgctgcgaccgggccagcggagactgtctgtctttaagggccaacaagcgatgccgaggcggtctgcagagcgagcaagcgggtgcaaaacaagcccgggcgtggaagtgcctcgctcgccgctgcggcaacaagagggggcgcgcgcgcggccaaagggcctcggcccgggccacgacaagcagagcacggccgggcggagacagcagacggcagcagcgagcccggccggcaaactgcagcagtcgacgcccttctcgttctactcgaccggaaagccagacgccatccgcccagcagcacagcttctccctagcacacccctcttcgcccgtcccagtctttgctgtccgggaccgcctgcacgcccgcacacacgctcgccgcccgcactccgcactaaggcgcatcgagcgccttcgttcgcctccgccgaccccgttcgccgccgcctgcgacacgaacccaaccctccctcttctggcccgcctgcgacacctctggctcgtctgcctcctcccagcatccacgctccgcatactcctcctcctcccgtgaccggccgatccgcgctcttgacgctcgcacggcctacatagccctccgacctccctcccgcctgccccgcctgcccgccatcccgaccggcatgcgcgcatgagcatcgaccccgtcttgtttgcccctccgttcaacagcagccccttgcgttgcccgtcgtccgagcagcacctccggatccactcgacgtcctcttcgtcggccggctcgtcctcgtcctcgccgccggcgctcgcgttcgtcaatctgtcggaacgccggggaagcctccggtcggtcgacctcgacccgcacggccggccggtcggcgggccctggaacgagtcgccacggagcaggagaggtagtctcgccaagcggtccggcgacttcagctggtcggccaacaagtgcgtgcctgcgagcctgccgatcgccgtcttggaagggtaaagcgctgacagggaccgacctcgcagaccagcatcgcccgtgccgtcccggagaccgtccttgacgccatccctctcattcaactatgcctcgaccggctcaggttcgccagccggctcaggcggtggcagccattcgcgaggccggcggccgtcgtcctcgtcctcggccgtcaccatccgggcaggctcgccctcgcagggtgggctcctgccctttggccactcattcaaggtagcgacggcagcagcgcggcggtcgtcgctgacgccgtcgacacacgtctcgcatgccagcatcggctcgtcgtcgacgacggccgtctcgatcggcggccacatctcgccggcgtccgagcacgtcccgctcggctcgcccttcttcagcccgagcccctctcgtgagctccggtcgtaccgctttggcacatctcctcctccgaccggctcgctcgccggccgcgtccatcgtcggccgagctacgagccgcccgagtcggaggacgccgatgccgaggacgacgacgacgacgaaatcgaccgcgcgcgagagcagtttcgcgagcacctgctcaaagccggcctctcgtcgatcccaatttcgttcccgccgagtccgggcgcgaggtcgtccagtggcacccggccaaagcctgtcctcggccccgtctcgcggcatgcgccgtatgggaccgtcgtcagttcagtcgactcgtccgcctcatcgagccactcgggctcgaacaggacggcatccaacagccggccgcatagctcaccggcgttcctgctcgaacggcggccgagcgggcgccacttcaaccccgagaaccggctcggccctgcggccgaaagcagcagcgaagaggacgacgctgcgccgagtccgcctcccaggctgtcgcttcgccagtcgatgagccggcagtcaatagacgcccgtcggctcgggctcgaggttcgcaccgtcatccgcccggccgacgacggcagtgggatcgaggacgagtctgagagcgaggagagcgagctcgagagccacagctcgtcgtctgcccagatgttgcggcatgacggctcgttagccccggacgccagtgccggcttgagcagcaacggcacccggtcgctcgccgcctgggactcgtacgaccttggcgttcagcgggcaccgccggcgctctcacttccgtcgccgacgcacgagctcatccggcacctcgccccggctgtcgggctcgaggagcggccgcgccgaaagtcaatttcgcctcagcaaccgctcaagtttgagcctgccgaggaccggagcctgctcggctgcggcccgacggctggcgtccgccgagggagcaagcaggacgcttcgccgccccgctcgctgtccgactctgccgtcccgcgtcggccgtctttggccgaggagctccaggcgacgatcccgcccgtccatctgaatccgtctggcgcggccagcgtcggcggcaacgacgacgttgagtgggacctcgactttgtcctcggcggctccggtccggtctcggccgagctcatcgcgccagagtaccagatcgccaatggcatgcgcactgcccggcccggggttcagtttggctcggccgctctcggcctcggcccgggctacgatcagtttggcgcgcccgacatgcagaacgactgtgcgtcgccctgtccctctgtccctttcgccttgccttcttgcactcctatggctgacccttttccttcatcgatcgctacccgcagcttttgcccagttcgtgcgagacaaggaccccatcttcgaggagatgcgcgtcgcttggacgctcgtcaggccgctgccgccgtcgaacgagtgggcgctgccgacgacaggtggctacacctatcttcactcgctggcggctctcaactcgccctcacgctcgtccatcgcctcctcgatcgacgcctcttcggcgccgtcactcgctctgggctcgtcctccgcaccgcacgtccagttccggtcgcccgacccagtcttgcgcgccaataggccgccagggctcgcctgggcgatcaagacgcgcggccggggctggggcatcgtgcccatgcagggcacgcgcgaggagatcaagtttggccccaagggcaagtggcgtacgaacgacaacggcgtccgctcgaaccggagcagcctctcgtccaaaggtccgatccgccggagctcgtccaaggacacagagccgcgctcgcgaggtggcagcggcatgtcgagcgagagcggcatgagcatctacgtgcccgaccgcgacgaggacgtgagtttctcgagcgcgtcgtctggccctgccggttcttctcacctctgaaactgacttggctggttctctcgacctgaccagggcacgcgcacgtcacctgatctttcgaccggccagcgctcgacgccgataccgatcgccggctcgagcgacggagcgcaccggctctcgcgcaaagacaagagtagcaagaagaagagtggctggctctcggccatcaagcaggccggctcggcgctctcgacctcgtcgagctcgagctcgcagccgcgctactcgatatctgcttcgtcaagcgggaccgacccgactggctcacaaggcaaggagggcaaagactatcagccgccctggctgatggcaggcggcggctcgcgcgaggagaagagcggcttggcctcgaagctcaagttcaaacggcgcagcgttgccgatcgccgcgacaaaggcacgtcgagcggcggcgagggcggagacgtcagcaccagtcttaacagccgcaagatgtttgagaccgacgacgaggccgacgacggcgaggcccgcgagggcaaggcctgggaggatgtcccgctcgaggcgctggcaatggtcatcccgctcgccgtccccaagtcgccggcctcggttcacacgcctcaattctcgagcccagactcgtcgcctgacgtagccaaggacgctgctggcggctgggccaaccgccactcgatccacatcgacccgctcgcggcgattgacgacattccgccgccgcggcgcaaggagcgcgaacgcatgcagtcgacgctgccggctctgcggcccgagaactcgctcctcgtctacttcgtgcccttcgggtgcgacgtcgatcgcgacggcgtctgccacgatctctcgcacgctcacggctcgacctcggcaacgccgaccggcccgtcgcgcatctttcagcacatgcggcttaaaaggccgggctcgcagaacttttcacgcggcacctcgacgccgccgccgcagctctcgacctcgggcggcagcacgggcggcggcagcagtagtgctggcggcggcggcggcagcagcacgacgcgtccgccgagcggctatctcggctcaaatctctcttacaactcgacaacgtcaaacggaagcggtggggtcagctcgtcgactgccggaggagcaccgtcggcgccactgccttccgacgttgccttctcgtcgttccggatcgtcgctcgcgtcgtcgacccgtccgatctgacgttcatcccgtcgtggccatcgtgggagtcgcaaggcccagctccgcacgcctcgtcccagccgcaggtcatgctttcggagcccgggacgaaccccgagaccaaggcgaaggagagccggacgggccggaccgacccgaccgtcgtcggcgtctaccatggcggcggcgaggctggcgttgagtttatccgcgagggctgggagcggctcggtttcgtgcggccgatgccggacgaaggcgactctgccttcactgccggcggcggcggccccttcaccaaggaggcgccactctggggctcggtcgacgaggacggcgagactgcgcttggaagtgtcctcggcgccgtcaccgcagcctgcgtcgccattctctcgccgcctgagtcatgagccgctccttcttatctttcccttgcgcctacccatcccccttgcccccggtcattcctgtccttcccttttctgcctcccgcatccctgttgctgtgttcgtcccatctctcacaatcccctcggctccactacccacgtctgcccgccctatttattccctgtgttctcaagtcgctcacgtcggagagggaggagggggcgtgaggcatgagatgggcagagtacaacaggcgcgggacgttacagctgccagcgggcatgaagagtggaaaagcgattggatgccggatatggcgaaggaaaggggacggacgcagcccgcgctcttctgcgaccctcgacggggcgagagcgagcgggcgtgaggaagggatgaagacaggtcgaaaacaaaacaaggtcggctcggcggtctgtggatgagtggtggtggtgggattaccggcgggacccagctagcgacggcacgaggcgatcacttgtactgcgggagaagcgtgcgcgtatcataatggtcagcgttacgcgtcgatggcgacggttgacctgctccaagcgaaaaaagaaaagagacgtacgctgccggacatggagccggacgagaccgaagcgcgactgttgagggagctcgagaggacagagtgcgtctcgggcgaggacgagggcgagtgcgaggcggcgaggctggtcctggcgatggaggccaagtcgatggctgcgcggagcggcggagaagtcagtcagctgcaggcaagcggggcagccgacctggccgagcgcacaaagacgacttactcgcgtccttcaggcactgcttgcggacgtcaagggcctcgcttcgctccttctcgttgatgatcttggcggcctggaagcaggaagcaagaagctggcgtgtcagccggggcatgcccgataaagggcgagcgagaacgacggggtcaccatcgccaagctcagatcaaccatgcgaagccagctgcgatccaccttctcgtcctcgccaagcgggcccgacggcttctgaatcgcggccggctctggggcgtggtcgtcgtcgagcggttcaaagtcccattcgtccgggtgctgctcgaggtggtggccagagaggttgccccaaccgaggtggccgccctagagccatcgagcggaacgcatcgaggtcagcaaggctgatcgaagcgtcgttgtccccggcaaagacgcaccttctttagcgaggcgtcgcggccgttcctgcaagggcaagcgggcaagtaagagtcagtcggtcggtctctggccaagcatgcgacccagtcgggtcgaggcttgcgggggacgccgtgcttaccgcgagatggctcggtcgcgagcgatcgcctttgggtcgacggccttggagctgcgagtcatgacagaggtgtgtgctgtaagaggattgggcgagagggttggatgaggggtggtcgtctaatgtttggtgtcggtcgagatggagaggcagaaggtgagtcgggggcgaaaccgacggtggcgtcggcggcgggcggcgtcggccgaattccgcactgccgccggttcgatggccgctcgtggacaagtcccgcctcgacagtacgctcgccacttacgagtccttccgaaacagcaggagtggagaaggagcagatcgtcatagaaaaggaacgtaggcgacgttaaggcggctcggaaaaggaatatgcgacgtgaggcgtcgccatgagtactggagtcgagcgaggcatgaggaagacaaaagtgagaccgagaggggagaaacaacacggatgagaagagaagaatgcgagaagaaagggtatttgagtggccgatggccgagtttgaagcggcgggggacatcaattgcgagaggggccgcgctcgatggtgcttcggccaggagcgcaagtcagcttcagaagatgcagacgatgaagcaagcacgtaccgggtccgtttcttcttcgtcgtccggaagacctcgctgaaaaagacgaggccgacgacgaggacctggacaaagaagacgacctcgagcgcggaccgcatccaagactttccgactctatcgacgacgacactgggcttgaacctctcggtccagaggagcgggccgtccgtcggagcgctcaggaggcgtcgaccctgacgctcgccgtcgatcagctgaaagtcgtcgtcgtccgacgagcccgcgccgtcggtgccggcctcgaggctgagccgcatgagtgcgagctcgcgtcgcgttggtggccgcaggttttcctcggtccatggatcctcgccggcttcgatggctgcgcggatgcgggcctcgcgaaagtggagccgggcgatggcagtctgctcgtcgttgatgaggatcgtctcacgctggttgcgggacagcaggtttgaggcggtcaatcgacagttggcagacaggaggcgcttgggcgagacgcacgtagatatcggtttcgaatgggtcgccctgctgccgcaaaagaagcgaagggaagtaggaccagatcgaccgcgggacgggcggcgcatgctggacgagtgagccccggccaaagagctcgtcctcggcccagcgcatcggccggtcggcgacggcgctatcgagcgagtcgaaggacgggcactcggccggcggcgtcgacgacagagagccgggcgggaccaccggtggcatcacgtgcaggctgagaccacccggcgtacgccggatcgacaggtggccatcgacgtgggccttggttggcccacggcgtttgggtcggagcgcgacgtgccgactcaaggcgcgccgagcaggcagctcggactcgagcgcagtgttgtcgttcgtgtcctcattgtcggcatggggatcagagcccttgctgtggtcgccgtcggccgggaacgacaggtgaaggctcgaacgctttggagtgcggctgcgccggccgaccgaccgaagacggtcagggcccgacatggctacccggtcaagagccttcatctcgtcctcgaggcttcggccagccggtgagtgtacggcgctcgataacgcgctgcccaaccctccggccgttaggccgacactccgtgccggcgagcccaccttgaccgagaaagagctccggttccgagtgtgtcgtcctgctgctgagagtggccgattcgctggagtcggcaggatctcggacgccctctgaaccgcgatcatgtgccggttgccggtcgcgcgtgagtaggttgacgacgtcgacggcgtgggggagtcgaacggcgtgccgaggcacgtcaccttctgcgagtagggggaacgctcgcgcgtaggtgaggctaacggcgacagattcgatacgctggccttgctcgacgcgttgcggagggctggagaggacggcgcaaagaagtcggcctcctgggatgcagcttcgggcgatcgagacgaggcgagtccgaagttcggtcgatagtgcgctgagaggttttcgtccaaatcgatctcgaggcccgcgcgctcgacctcgtgctccagtgcattgtagacgccctcgagctcggcgccgtcttggatggcctggctcagcttcgagtcaagctcgtcgcgcttgcgccgaatgtcgacgttggcctgctcgagctcgcgtattttggcaaggagctgagcgacgacttccatttcggcgttcgaccgatgggccgagggcgaaaccgactggcgcatggttcccgagcgaaattccgacaatgccggtcccagaagcgaaagcgaccgcgtgcgcggcgacgtcggcggagaggccgagcttgtcgatgaggccgaccgcacggagtgcccgtattggtgcgaggaaggcgagggcgcaaacaggtcctccgaagatgcctcctcgtgagccgagtagtcctcatgcgttgccggcatccgagggaacatgaagcgctcgtctcgcaggccgccaaggtcctcggtcctcatctcccacggctcctcgcgccggacgctgcgctgctcggacgaggtgccgtcgcgttgatggcggccgatgcctggcgagatgacccggacgaactggacctcgagctcgccgttcttctcctggagcgactcgaccatcgtctccatcttttcgagctctgcccggaggccgccgatctctttctcgagccggcgcagctgcttgcgtcccgagtgatctgcctgggacgtttcggcttggagttgctcgagctgcgtcgccaactcgtggttttggtcgcgcaggaaggtaagcgccgccggggacgccgagaggcttggtgaccggcgtttgtggcccttgctgagcgaggtcggcgactcgagcgacttcagggcaaggagccccgaatgccttgccttgacaggcgaagtgtaggccgacggtaatggcgagtcgtctgagaactcgcggcggctcgttggaccctgccgggcgtccgatgagaacgacaagacggttggagtgaccaggtcgcgccgggcgccaaccgaggcctcctcgcccgagccgtcgtcggtgacccaagacgactgctgctggacggtggggcgagcgagacgtgggcttccgtcgtccccaacctctgcagccgtctccggcactgcttgcagcagcgactcgtgccgccttcggagcgcgatgttattctcgagcagcgacttgccgatggcagcagcgacgccgagctctaaggccaagaaggagagagagcaaggtcagcaatctagtgattgctcgtcaagtctcggcgaggattcaacgcacccttctcgcgctcgcgaatgacacggtcggcctcgagcaggaggaggtcgagctcctcccggctgcgcgccttcacccactcctcggtgacgggttcgctcgtctggacctcgttttggagtgcgtcgaggtcaatgtcatgcatgtcttttgagtcggcatcggccgcgtcctcgacagcaaggctgcggtcgtgacggagcgacgggtacggcggaggcggcggcgaggcgacggtcgaacccgccgacgaggtcgaatggctgagccggccgatagaggtggctacgttctcgtttagcgtggagaagctgccgacgacgacatgagctggggcagatacggtcctgttcttcagaccggcctttggcagagcagaaggcgggccggatggaggtggcgcgtcgtcggcggcgtagccggccgagctcgtgctctcgtcgacctgcgaggcgatccgtcgctcggctgtcgtccggcgattcgacgagcgcgcccgagtgaaagtcggcggacgcgggcgaggcgtgctcggctgctgtagcatcgcagccacgccagaaagtagagggaggaaggaggaagggcgagatgggcaaggcctcccgcgtgttagtcgggcgggagagggggcgcgacggcgggtccgtgcgggagccgggcggcgacggcgagcttgagcgacagcttcaatcgccagcgaccgaaggcgggagtctgcgtgcgcttgctggaggtcgagaagagtgtggagaggagtacaagggggttgtgagagagacaagggggtggtgggcggtcgtgctcgccagtgttttgccttcaacgagaaggcaggcgcgcccggcgcgttgccctgctgcgctgcgcggctgcagctgacatgcgccaaagcgctcctccgtctcgagtcttccattgcaagactctctttgctactcgtagaggcatacatcatctaaggagtcgactctacgcgggactcttggcttttcaaacggctttcagcttgccgctcccgttcgagacgggcccgggtgccttgccgttgccgttggtgctccccggctggaatttcttggccttgctctctgcaaaggtgggtcggggagggagaggatcaggcctgggaatctcgcgtctgacaagggtggcaacgcaccagagattttggcccacgcctgcagttgccagtgatggacagatggtcagcgacagcgggatgacgatggcgagccattccacgcacctcaacgccaataccgaggaagacgacagcggcaccaagccactggccagcggtgagcttgtggtcgaataagacgacactcaactgcaggaaggcgggtacggcaaacagtggcgcagtcttgtcagctctcggtccaggcgtggacgagaacaagtgtgactgaccatcatcgtgaagagcttgcgcgtgacggtgaccatgacgagcgtcaggctgccgtagcgctcgagcgtctcaaaaatgaagagttggccgagcgcgccggtgagggcgtagagaataagtggccggagcagcgtcgggtgcaggtggaggaaggtcgtgaacgtgtggagctccgaatggggcgatggatacgggttgaagagagggaccctagggggcgattatcgaagcagggtgtgagccgggcgaggtgggatgttgacctggagaggcactcacgcaggcagcgggaaggcgatcagcggcacagagatgacgagcgtgaagagcgacatgaagaacatcatttgctggcctgcagtcggcggaagggtgtcagaaggtcagcgacgggactgcacgttcggtgcaggcgtcggacgcacccgtgacgccgcgccactttttgaatatctcgtcctggcccgagttggtcgcgccgtcgatgaggaggttgacgacgaggagaccaaggccgagcaggctctcgcctccggtgctcggctccttcttcgacgccgagtgcttcgatggcgggccctcggagccgagcaacatgaagagcgagatgccgagcgtgacgagcgagacgacgaggtacttgtgcggcggaaatttgcgccggtagagcaggacctggacgagcagcgtcgcctgtaagctgcctgaagggacagagaccaggttggtcaaaagaaggaccggagcgactcacgttcatgaaaaggacggggacgagcttacagctcttgccgagcaccatcgtcgggtagctgatgtgccggaggctcgcgaagccgaagggcgcagcgcacgtgttgagcagcgcaatcttgaagtagccaaagagaaggcctcgcgagctctccttgcgggcgaggccgagcatcgtcttgagcgacggcgacgacgccggccgacgtgcgagcaagtacacgaacgaggcgacgagcgagccaaacgcctgagccgtgttgagcgtcagaatcgacaagaaacgcgacggtgggtcgagcggcacggtcgacgggaacggcaccgacactgagaggcatcagaggatcgagatcagcccgtcgtttcgtggcagcgcagcgggcagcgggtcgcgagcgtgagacacgccaggccaggacgcacgtctctcctgagcgatggcccagagctgagaagaaagtcagagtgtcagcgcagtacgtagccgcttgcatgagctctaacgtacgagaaacatcgcgtagacgccgccgcagcagattccaaggctgcgagcggaagggaggcaaggtgttcagctcaaggctgcacgagtgggcggcgcgtcgaggcgagcgggcaggaacgaacgggaggatcgacatggcttctttggaccagcaaaaggaagagccgagatcgggcaggaaagagagcgtcgggccggcaagtctacgagcggggagaagagaagaggcgaggtgatggaggacagaggagagctaagccggccagctcaccgtcgtcgcgaggagagcaggtaccaggctcggccaagctggattcccaggctcagccaagctggattcccaggctcgggtaaaaacctccatcaatgaatcgagcctgtcgctgctgcatcgctcgacccatgccgaccaagacgacaacgagcaacgccggaagctgtctctcctggaccacaacaaagagcatttcgcaacgggcggaggcatggtatctcaggcccctgccccggtcggtatcggcggcagtcgggctcaacgaggtcggtctttgcagcgcagctgccgcaccgaccggccgtagccgaagctcgcaaggccgcctcgggcgacccgacaagctgaccgctcgatggttaggcctcagggccatccttcgccgacgagattcagcagcttgggctcggtccgtgctggccgcctgcaggctagcacgatgccgtccggcgtcgttgtttcggttcccctgccagactgctaaatcgggcttgacgactccaatccctgatgctcctttaatacctcttccctcgccgcatgccgctgcgccgctgttcccctaagcttaccatctccttcgaaaccagctccgaatcctggatgaactgactcccgcgacgcttgcagtagtgttcgggccgcgcccgatgctttcaagcgctcaaaagggagcgagctcctcagactggatcgacgaccgcgtccccccccacccacccaccccaaggtctgctcggagactcgggaccgtccggcggccgaggtcatccgctcctttgttggccccgcgctgttcaacccacgggacccgcatgtgttcatgctcgtgctcgcaatccttgactacacttcgccggtcggtatccttgccgaggacatgacgacgcacgccgagcgcaaggcggcgatcgaaggccgaaacgacgactggtcgcgacttctcgtcgagatgccagtgcttttcaggtgcaccacgagcgacctagacgaatggcatgcagcagagaagggcataggcgctttcgaactggccgaccaactccgaggcctcccgtcatacatcgagcgcttcatcggtcacctcatgaacaaggactttccaccaccgcccggggtcaacgagtctgattggaccaagcgacacgaggtcatggtagcctggcaggatcagaaggacgtgcgctacggctggctctttggcttctcgatgagattcaatatgcagtgagcccagctacaatgcctcttttccaaccggtcatgtcgatcggccgctcgtccaggacagcccgcatacctcaaaaggaagggccgctcaaagggcacggggccgaccgcgagtgaatatagagagcgaccgcgacctcaagcgacctcctcacagttgtcggccgccgtttgaccgtccggtgatgtgaccggtcgtgtcgaactctcgatcttggaccaggctatgagtctgcaggtaggtccgagaggcaggcgttggtccgcgcgagagaggagacgccccctcattgaacgcggccgacaagggcaggcgaacagcgcctcgctcgacgcaaaggacgaccctcggtcaatcggcctttgactcgacccgctcaaagctgcgatcgcccgcgcgcttcatcgagagggagccgacgagtgctagaaccagacgtcctcgggtttgcagcggtgcaacctgccgtctggccggaccgagcgccggtcgacgtccttcggcagggccttgcgcatgtcaaaggcatcctcgccgtccttgccaccgcccatgccgttgtagtagccctcaacgcgccgatagaccgagtagcccatgccttcgtacatggcaatcgcaagggcgttgttgcagcggacaaaaaggtcgacctggggacaagagagagagtgcacgggagggcgggtcagacgccgaaagcgcgaagggcggggaggagagagccaggagattaggggaccgacaaagtagccgtcgtgcgacggcgaggccgaagaggcctcgagccggtccatcagcgatgacgcaagcttgagccggcgatactctggtgcgaccgtcagcgcggtgacgtggccgtggtggtcggtgtcgtcgccttcgaccttgccaagcactgcaggagaaaagcagcagcaagggcgaggaggccgtcagcttggtcatgctgggcggagggcgagaggacgcaccgtatcccatgagtcggccggagctcgtcgtctgcgccgcgcagacgtcgggccactttgcgaggtacgacaggtagaactggttagagtactggtggagggcattcgtaacatcagagtcagttaggggcttctgcaacagcatatgccaggctgaacaaaccgtctcggtgaagacgtcgagattgctgctcgggcgggcaagccagcgtcagctcgctgctggaccgaggggaggctcgagccgagggccgcacatgttgttgaacccaaagaggtcggtcgcccggaagggcctcagaatgctcatcctgcctctcctgtctgcgacgcgagtgataaggacaagtcgacgaggtcttggctggctggccgccctactcaggttgacaacgagcgtcgagacagcgcgggaaccttgcggcgaacctacaagcgagaggcgaacctgccagcgagagtcgctagtcgctggcaggttcgcctcaaaaaggcgctggcaggttcgccaaacctgcctgctaaccatcggcagggccgccttgtgcggccatagcggtcgttgactctctctcgatagtcttctcccttcctgaactgctgtagagccaactccagcacctgataccgtccgacgggctggggggagggttcgccctcttctcaactccgctcgagcccgtcttctgctccaagccagaggcgagccgccggacgtaacggtcacaatccttcctttcgccctcccgtccttctgtatagctagacgatgcccatggaccctgctcaggacaagccgtcgccatcaggaaaactcgctgagcagtgtgagctcaggacctcgcggcgagctcggtgatgtcgcccaattgccttctgctacttgcaaaatacccgcgaaagcagctgtacaacatgaggtatcgggagccatgaggtgaggggaggccggcaggaggcaggtgtgcgtagaagaagatgagtgtgagctctcgaaggcaaggccgggaccttggaggacaagcgcggaggatgagaacgcggaggacgaagcagcacgccctccctagaggaatgaccgccatctactggaaatactcgggtttcttgacgctaggagggtgcgcagaagaggtagagaagggaggcgagcgtcagcggctcggtcaggcgccgcgagaaggggagcatgcgggactgacttgacgccacgctcggccagactcgcgctcaagtcgtccatcgtcagcaccgtccgattcttgtcctggtgcgagccgagtcatgcgcaacagctgtcgtcagcgctccagtcggctgcgtgcagaaaggttgggcgatgcgacgcaccttgatccccgcggcggccggccgacctcggccttgcggctgagcattggtccggatccgagcatagtgaaacgcgtccttcgagatgtcggacaggaatttttgcgtcgtcaacgatagcaggcgggtcctggatgcccgccgaaaggaggaagggtgtcagctaagggtcgcatgtcggtcgaccgaccgcgcagcggcagctcgagccgaggcgggaggccgccagtaagaggaccagacgaacaggcgggggtcggtcgactcaaagccggccttctggaggtagtaggccgtcacctcctcggggatctgtgaggcacgaggttgcaagagggacgtcagcagcagcttccggctatccgttcagctgagtctgccagcacgccggtgccagcaacgagctgcgagcggggaggagggcaacgagagggaataacgcacgacaggctcgtacccatccagcagctccatgaagtcgacgagcgtccggtccttcctcgcccgctcctcggccttcttgatctcgtcggtcgagctcgatcctgcgggctgttgctcgccggcggaggacgaaccggcggctgctgacgagcctcctgcgccgagcagagacgggtcgatgaaggcgttgccggacatgaaggccggtttgctatctcaagagagcttatggatctaggtcgagtaggttgtgcacgggctgcgttggcacgggaggagggagcaagagttcgggcgtgagtgacgagcgagcgcggcccgagagcagctctcgttgagcattcactcacaccagaggacgagcgaagcttgagcggtggcaagaatgcgcaaaggagctcttgtcaggctgattgaggcaagacaagtagggtaaggggtgtggttggggatggacgatggatggcaggagggcaagacggtgcggcgcgtcgcgccggcacctcgtccggctgggacgacgcacgcacgcgaccggggcacatggcgctctcgcaacttcgcaagatttggtcgttaagcaggcattcttgatagcagggagcaaatgactgaggcgcgcatgatgagcgtgtcctaggtaaggggcgtgtgaggagaaggggggcgtgatgggaagatgacgagtaaaaagccgtgcagaagaccgaccgtcggccgccggcaggatgtccgggacggaagggagagtgaccgcttcaagcagagagcgtgtccggggcggcatcgccgtggacacggacctgagagcgacatgaataggagaggtcagcaaacgagcgcgatcgcagagcacaggtcaggtcgaggagacgcacccggtagagacaagtgtagtcggcgccatagttgctggcgacgcggacgacgacgatgccgatgtcgacgccgagggcctggacgtccttcgggacggcgaacgtctggacgtgcttcggcgagctgatgtcgtacgagagctggccaaggaggatgtaagccggcgagggcggaagcgaggacggcgacgctggcgtctcagtcttggcgcggccctcctggtaggctgcgaccttctcaaggttcgcctggccctcaacgagaccccagactgaagtggcagcaatgtaggagagtcagcgcgagaaagaggacggtgctcgggaagggaaggggacgcaccctcgacgtcgcgcggggcagccttcatgtcgaagctgacttcgcgtgcagcatgctcgatcgtgatggccgagacgaggatgcgcctcgcgaggaggatgccgagctggccggtcggcccagcaaatggccagcaattgccgacgttgatgtcgggcacgagcgccgtcgccggcggccggccagggatgaccttgggcgggagcagcccgccccaacgagcgatcggctgctcaaacgtgtccgaggtgatgtgcgggatgatacgcccgccggccgagaacaaggcgtagtcggccaatgcgagcgtgtccttcgagtgacggaggagggcggcgtcgattaacgacgagaggaggccggcaacgtcgccgttgtcgccagcagcagacgccggcaccgcctgcgaggtcgggagtcgggcgagagcagccttgacggcccgatcggcgtaaacggttgactctgcgagcgatgagcgtaccgcgtcctcgcccgtctgccgaaagccagccgattgccgctcctcaagctcgatcttggccgtggcaagctcggcctggaggacacgcaggaactcgtgtcgagagataatcgccccggcctgcgcctggcggtcgagctggccgtcctgccaggcctccagggctacttcattggcggcgaggaagtccgcccacgaggccggctccgagatgatggtggccgcgggagtagcgggcgccgagggagtcggcaggccagcgagcagggccgacttttgcttggcgacctcgtctgagacgctcgatggcagctcttgttgggcgacgaagacgtcgcgcatcgcccgccagaacgccgggtcaatctcgagcgacttcgtcagcgggtcgatctggacggcgagctttgccgggaggtgcgcctcgatggcgtcggcggccgtctgcgcgagccgggcggcctcgagcgcctgcttcgccgaccgctcggcctccaggacgcgctgctcgagcgagacaaagtccttacgctgggcgctgactcgaccgtcgagggccgtcatcgtccggtctgagaggtcgagccgggcggccagcacctgaacgtcctgagcgacacgccggccttggctcgacactgcgccgagcgtgccctcaactcgtgtcaaccgttcgaggagctcctcaacagagcctggtggcagagctagggaggagagaggctgctggccgtcgtgcgagccgaccggccgtgcccgccaagacgacgggatgtcttcgagtggtgaggtgggtgacgagcggcggccgacgagggatgcaacgagaagcaggccgaggagagccgcgagcggcatggctaccttgcgccagtcgacgagatcaagcgagtgacggaagctgtcggcgaccttggccggcttttcgacgatccacgagacgacggcgacaagcgaattgaaggcaaggatgaggccgacaaggatcgcccggaggatgccgagaagcagctcgccgaggccggcgaccgggttcggcaggttgagcgaaggacgcggccgcttggagcggccggctgagcggccggctgagcgttgctgggccgaggcaaactggtcgggcgagccgagcggcgatgtctgcgcgcctggatggaagcggacgataaacgagtcctcctcctcgcggttggacggccgcgggtcgtaaccaatgccatccaagcggtcattgttgctgcggtcgccctcgagggcgacgagatcgtcctcggcactaccttcgccggcggggtcgcatctcccgcccttgccagccttgcgccggcgcttcttgccctcgacgacgggcgccatacccacggccccgtgggccgtcaccttgccccccgaccgccggcgagccttccgccgcacccggccgtccgtcgagtcggactctgaagccgagtcgcccggccggtacttaaacgtcttggcgtcgtccgaaatgcgccgcgtccggcggcgtgaggtcgtcttggtcggtttggccgggtcttcgtcggcggccgagttgctgccgaggctgtcgttatcgtacgagtcggacgactggtcgccgccgctgaattcgtgctcgtacgccgacgagcggtcgtcgctctcgcgcaacgcagacttcttcttgggcgtgacgtcggccggctcgtcgcggctcgcactgctgccgcggacaaactcgccgagcccgctgaaccagccgccgctgctggtgttgtttaagccgccgctgccgctggcgacctctgcgccagccgaccgcgaccgcgaccgggcccgcttggcctccatctcggccagcagccgctcctcctcgtcaaagccgtagtcggacgcctgcgagtcatgcgagcggtcggcgctcagcgcgaggtcggacgacatcgagacgtcggccgccgagttggccgagaggtagctcgcgtcctggaccgaccgcgggggagtgagcgaccggcgagggccgagcgatgggcggaacgacgacgagaagctctggaagccgctggccccatcgtcgttgtcgtaggtgtcgtctgccgggaagggtgcgccttgggcgacccgcggcttgagcaggtagctgacggggctgagcgcccgggccgcgccagcaatggcgtcgagcacagggctcttggtccgctcgcgccggcgacgtgcgcgctcctccccgagcgcagcgacgtcgtcaaccggcatcgtccgcggcggaggcggtagggggccgcggcgcgtcgtcgatgagctcggggcggcaaacagcggcgatggcggcggcgggtggtgggtttccttgcgcgtgtaggaggccgaggacgtataggacccgttaacgggcgagtagttcgaggtcgacgagctggcgggcgcgaagcggccctcggcctgatggatggccgtcgcgatgctgaggccggcgagagggggcgcgtcagcgacaagctcgaccaccagccctacagtgcgatgcgactcacttgacagaagtatggttgagcgacgcgccgttgaccttgttgcggccgatggtcgtgtcgcgcttgcgctcgttgagccgggcttgcctgagcgtcgacgcgagggggcgggtcagtgaacagtcgcaaggatgcgccaggcggagcttcatccgtgctcggtccaccctccaccctgaacagcccctagagatgagcagtgaagtgctggagtcgagtgccggctcgagggcgcaggctcgaattgatggggggcacggccccccctcacgagctcgagcggagagagggaaggcggagggcgagacgcacctgacggcagccgactcgatctggcggaactcgtcgtcgctctcgtcacggtcgacgcttacgcgcgagctgctgcctgctcggctgtacattgctggactcgagcgtcgagcggcggccgtggcggcgagaagggtcgggctcgggttgagcgaggcggattcgctcggaggcgcgccgtaggacgacttgagctggggcgagttgtagatgggcgttgagcgacggcgagctgatgctgctgagcgttccttaggttgctggggcgtagagttgctgggagggggtgatgggtcggtggtcgaggaagcggtcggagggagctgggctgacatcgggacgcgcgcggccggaggagggggcgcgtcggacgcgcgggcaggaagcgcgacgacctgctgtgctggtagagagaactagcagaggggtgttctggcgctccggtcgacgggatgccggctggatgaagatggctgtcgggagggaaggcggccttagagttgcgaggggaggacagaggggcggtcgagtatgagggcgaagggcaggctgctgcgaagtgtcgtgctgcgcggaagacaaaggggagtgcctccctcctccccctttgaccgctcttctctgctctcaagttggggaaggaatcatagagatcgcaacgtggccactctatcggccgagcatgccggtcgccgtctcgaggacctctgttgagctgaatggggagaataggtgcgtcacgaggggggtcagcgcccttcctcggccgtctctcgccgtcaaagaacgctacgtaccgcttggcgtcgaggaagagcgtgttcatctcgtcgatgtcctcgacggcgatctccacccggccggcaatcttggcaaggatggcagccggggcgagcagctggatcgcgtagctgagaaggggtgggtcgtcacggaaggcgcgtcagtcggctggatgccgtcaaccggagaatgtcggcccagcactcaccgcatcgagctcttctcgccctcgtctgcgagccggtcgagcgcggcttgcccgacgctgagcccctcaacgcctgcccggatcgcgaggacctcgcgcatctcgtcccggccgagcggcatcgtccggacgatcatgcaccggtcgagcaggtcgaccggcacgccgtgcggcgcctggatgccagggccattgacgtcggtcccgcgaatcgtgcagagcccgcggttcgtcgcaaggatgacgtgcggcgagaggggcgattcaagcgcccggttcagatacgtgaagcactcgatgtcgagcatgtggaccttaacgagcagaagaggaagtagagtcagcgactgagcctcacagacgatgcgccaacagaggacttgggtgtacctcgtcgatgaagagcacgccagggacaagctcggcgacgccctggtcgatgtagcgctggacgaccttgttgacctcgcccctcagcttctcagtcacctcggtccggccgcccttgacgagctgacccatgaccgacatgatgtcctgccctccttggggccgggcgttggccgagtcgaggtcgtgcagcgtcacgtcctggataaggtccttgcgcttgtgtacgtcgcctttcggcaagggcacgtacgagtcggcctcgaggtcgtactctgaagcgtacgcatcggaccgaccgactcgctgaagggagccggagaggggggcagtgtcagagacgctcagtagacaagagagagagagaaagagtcccagatcggctagcgacgcaccttgaccgcgcccgtgttggcctcgacgtagatgacgtcgccgacctggaccttctccttcatcaggccctcgtagatgcccgggtcgagccggagctgcttcgtccccttggtcgtcttgagcccaatgacgacgtgcgagatcgtctttccgtagcccgagagcgggttctcagtctcggtcggcgtgagctcggtaagctcgccctcgtagacctccttggtctccttgacgcgaaggcctgaggtgcagaggaagcagtcagacgaggaagcgagccgggacgtccagagagcgagctcgacgcaccgatcgcccgccggaagctctcgccgaggacctccgtcttcttgacttcgctagagtagacctcggagccgacgatcgcgcagaaaggcaccttgacgccgagctcctgcgagacggccatcgcgagcgccgtcttgcccgttcctggcgggccggcgaggagcagggcccggccggagaagcgcgaggaccggatgagatgggtcgtgaggccgcacgcctgcacaagggagcaggagcatagcccgggagcttcagcccaagctggtcacaatgatgggaatggtcgctacaggcagcagctgctcacctctctggcctgaacctggccgacgaagccagctgcggatgggatggcgtcgccgtcctccgtcagaccgagacccttgctgttcgaggcgcggtgagcgacagagcaacgattgttagtcgcctgatgctgctagaagagtgacccgagctgggtgagcgagtccgagctctctcctccctcgggctaggaggaactcgagctcgtctcgtctcgctcggcgcgcgagctctcgcgagaggacggacatgtgcgagtgcgtagcgatccgagacgaccggtcagacgtcgtggcgggcgtgaccttcatgctgaagagggtttccgatgggctgtccagcaggagttcggttgagaatagtgggacggggatgagagagagaggcaggcggcagaggtttggaggatgagtgtcggccgggcgaggcaagccaatttcgcctgagggacgacgacgacggccttccttcgaccctcaacgccatctcgccctccaacctctctgcaggtcatccagcacgctctcagagatcgaccaggaggctatcgctcgactgcaacatctcacgcctgcgtagtcattgaaggcacccggtcggaacagctcgccgcccttgggctcgtcgcgcgccctccattccgtttgggctctccccgccggtctgtcatcgctcggcccgtccggcccgttctggtaggtcggtcgccgctctacctcatccgagagaagcccgcaggctgacgaatcagaagccgatcgctaccgcagtccattcgacttcaacgctgccgccggcggacaagttagatgtcctccctcttcaactctgcctcgctccgccggctcagcggctcccccattagccaacccccgaccgccctacccgacggcgaccggaaggacgcctcatcttcaactggcctcgcatcggcccctttgccctaccagcctcggcgaaggactcccggcgggtcgacgtcgagcatcccacctcctctggcgctcgcgagcgatggcgcagcgccggcagcaggagccggccgcgcgcaggcgtcgtcatcctcctcgtcgtcgtctgccgtcggccagcagcagcacaccttcccgccgccaccaggcgtccaggtaacgtcgccgacgtcgtcgactgcggccgtcgcgacgccgacgaccaatatcacccggctcttctcgcacccggtgacgccaacgacatcgacgaccgacctctcgtcctcggcctcgctgtcggcctcgaccgagacgctccatccggccccgaccgcatcttcgtcgtcgctggcagcggcagaggctccttcaggcgttaacgtcagccgggcctcgtcactctcaaataaggacgcgaccggtcggctccagctgacgaacctcaaggcgacggcccagcgggcaatcggtcttgccaatgactcgctagggatgaggatgctcgaggcgctcgtccaggatggctcgtcgacggccgagtggcgcgctgtcgtcgagcttctgctcagcaagaaggtgacgctcctccttccggccgcatcggcagggacggccgaggttaccgtcgaggtcgtgcgcgaccatctggcgttcgtcgagctgggcgagggtctccggagcggtagcgtttgcgtcctcctcaaaagcggtctcgtcggccggctcggcgaggacgaactggcgttcgagtcgtatctcccgccagactcgcccgccttggctgggctgctcgatcccctcacgcgcaaagcggcactcggagcgaccatgctgccgcccgcacccctcccaccggcctctccgtcagactcgtcatcggatccgatccgctatccttcggtcaccccaacacgttcgtcgctgttgcctttcccgcctccctcgccaccgccgccggccgatgcgagcctctcgcctcaagccgcgagcaagtccatccgacgcgcatccctcctgccggctgcgccgcgcaaccccttcgcaggtctatttggccggcccagggctgccagtgctagtcccgctacgcccgtcccggaggccagcgcgccggaagctgcggaggagaagccagcggctgagaccgagaaggccgacgcacctcctccaccagagccgcagccgatggaggtcgagttgcagccgacgccgcccgactcgcgcccactctcggtccgttcggctcgttcccgatccccttcgccagcccgatctacggcttccgccacggcggccgcgatagacgccccaatcccgaccgaagagatgcccaaggacgagaagcacgctcacctcgtctctgcgctcggcatctcagtgccgatcaagccgaccgacatgctcaaggcgctcggcaagacgtggcgcgcccggctggccgacgaactcgtccttgacgaccacgtcctgccctcgtccgtcgtcaaaattgtccagcgtttcgcctgcctcccgctgccggccgccggccaggccaagtcattgacggccccgccttcggccttcaagaaggcgtcctctacggcggcggcaaccgcgtcgaccgcgacgctctcctcattgaccggcgacccggaggtcctcgcggcaggctaccaagacttctactcgctagtccacgaggaactcgaggtggccttccggaaggagatggttcgcgcgctcgcagcagaggaggagggcgtccgcgaggagaagcgcgaggcgcgtgagcgtgagattgagaagcgcgcgctcgaaggcgttgacgtgatcgagggctgcctcgcgagactccactacaacctgtacgtgatggcacccaatcgttggtcaatcattcccaggcgctgatgacatccgtcgtgaccctcccgcagcatgttttcgccccaacggtcgagcgacaggcagcacgatgaggttctggccagccggatcgccgccctcaatatgctcggcctcacgctcgaccacctcggtgtcgtcacgatcctgccggatggcagtcggaacgaggccgtctgcactgggctcgaggcgctcgtcaagacggtcggtaacggtgagtggagacgccttcctgagctcctttgcagctcgactaacgaatgcccatcgatgtcacagagctgcaaaagatcagcgcgcccgacaacctctcaacacagtcgaagtcgcacgtgctggtcgctgcccacaagctcgttatcgaagggttgcgcctgctccctccgatccgactccggcctgagggggaggagatgccagcttcgacgccggcgatgaccgagatctcaacggctgctagcacccctgctgagtcgggacaggaagaggaggaggcgcagctgcctccgtcgccgcctgtgcctgagcagacgtcgggccaggccagcgacgcggtctcgatcgcctccgatcctctgctcgtcggagggctcgaggaggcgatgtctggcagcgtgctggaccttccgtctgctccgagggcgccagaggacgatgcagtcgttcgatccccgctcgatacgccgcctgacggcgaagtcacatcacctgcggccgcctccactccggtcccgacatctgcgccgcaaggctcggcatcttcatccggggccgacctcctgctgccgcttatcatttttgccgtcgttcggtcgaacccgccccagctcgtctcgcacctgctctacatccagcgctaccggccgaccctctgcttctcgggcgagggctcgtacgcgctcgtcaacctgacggccgtcgtcgactttcttgaaaacgttaattccggcagcctcggtcttgccggcgagggcaaggtgctcaggtgggtccccaggccgactcacgcgacgcttacttgaagagctactgacgtcttgtcgggcgacccccgtgcgcggttttagcgccgactttcagtcgtttgacgaggcggtctccaaagacctggctgcgctgtcgacgccccaggcccaagcggctgcccagtcgcgcctccgcggccgcgtcacgcaagtctcggactttgcctcgtccggcctcaacaacgttgccgcgacgggcctcggcgcgctgcggtcgctcatcgagaacggccagatggcggcggagggtttcatgatccaggtgcccggcgtcacgtcgagcaacccgacccggccggcgctcctcggccgcaagacgtcgggcttctcgatcgccaaccttgcgacgagcgtcgctggaatggcggcgagtgctggcggccgggctcgtgagggctcaatctcgagtcttcccggcgcatcgcccgctatcggcagtgggccggctgcgcctggaacggcggccggcggcggcggcggtcccggcgagtggggcgtcaagcgcgagatggtcgacgtctcgtcacgaccgggctcgatcttcgaacgcggcgaagtgtcggacaacgacgagactgacggcccgcgtcgctctgacgcgtccgatgacggtgaggatgagattggcgccatccgaaaggattcggacgctcgctcgattcggagcacgagaagcgtcggctcaacccgctcgcttggggcgtcactcaaggcagcagagggtccaccgcttgtgtcgccctcgagcgagcggctgagcatcagcgagcgctttgcgcgaatgtcgaccggcggctctaccggtggcgactcgccggtcgggctcggcagctcgaacagtctaccaaaggtgagccctgttgccgcttgcgatgattgacaactgcctccctgacggccgacttgctccctctaggccacgcctttcctgccaacgcacaagacgcgctcagcctccaactcggtctcttccctaacgccatctacgaggcgagcgaccattcttggcggcgcgaccttcatttctcccccatcgccgacccgcccgaagtcggtcatcagcccacccacgacgtcgcccggcacgccgcccttgacccttccgccgctttcgcaagtccacctgccggcgtcgtcgcccttgtcctccaacccgtcggcggtggacggcgccgacaagccgctatcgccgcaaccgacgcatatcgagcgtgcacccggaccagaagaggacggatccatccggcctccgatcgcgcgcttcatcgagtgcgccaacgcgggtgagctcaagctggccgaggtcgctggtctgctgcgcgactatcagcggctggcgggcgccctccggtcgatcggtgtttgggacgactagatgccgcgttgcctattcttcccgtccactcttgaaagccaaagcgagcagagacgcatgagctacattgaggcgagcggcaagagtaagagtgacgaaaaagggaggggtgttgggagatttaagcggacagcgtgcctgccggccttcagaactcggtgccctcgagcggctgggggatcttgcggttgttcgggtcggccatctccctgcagcaaaacaggacgctcgggtcatcagccgacagtcctcgcgcaaagaagtgaggcaacgaggaaagaggggaagcacttgcgtaggttgacgaggaccgtctcgatgctcatgtcacgccgccagctgtgcagcgccggcgtccgcagctccttgtagctcagctttcgcaccggacgatacaggaagagtggagacgcggatgagtcagcgttagaagctctttaccccagccgagacagaggggaacgacgtacgactccgctttgctggttgacgccggggaggacgatgcgcgtcacaaagcgaaccgtcggcggctttgccgggtactctggcccgcagacaatcttgagcgagtagatgcggttttcaaagacggtctggattgagcggaggggttgcggccgtcaacttcgggcgagagctggtcgggctcgacgatggctgctcggtcggccggtgacgcgatagtaggagagagctcgcgatgatggactgggcagcgacggacgtacgtggccaggcccgatgatcgttccattccagcttttgaggtccatgtcgtctccgtcctgagaagatggtccgcagaggtccagtcagcaggtgctaagctcagacttcgatgggacgaagggaagcagggcaggctcacgtcgaggccgtacgagcacgagccatctccgatgcccttctcgcccttctcgagctcagccaggaggacaaaggtgcgggggacggcggcagacatgatggaggagttgtcttcagtgattcttcgctgtgcagtcttgattgtgaagggaggcttggatgaagttgaggaagatcaaagggtgagggatgaagtagaagacaaccagggcgaaccgagccgactcgagcgctctaccgcttgcaagggcttgagcaccctcaaccgccatcttgcccttccttcgattccctccaaccaagttgacctcagcagctgaccgacgaggaaactcgcgttcacgtcgtcaagtaggtgagccctcgagtggcgaccgcctcgggtgaggacgacaagcgctgacgacctcgactgtaggctcagctcgctccctacccctttcaaccgacgcccgacccggtcgacgagcccgctaccccgcccggtcatgctctattacggccgcaagggtcggctggtcaatcagccgccgcttcccgagcacaagcagacgcacgacctcctaatgcactacgagaactatccgggcgagctgccggcactcccgccgctcgacgcgccttgggaggagaaggtccggacgcacacgtcgttccaaggtgcgtctcgcctcgcgtccctcatggcccagagcacgtctctggcggctcgtccctgatagtcaccgcgtggcgggacgagttgtccggggttggaggctgttgctcacaccgcgctcgctgggctgaccctcacgcgctctggcccctccgcccgtttaatcacagggctcacttgggagccgttcgagacgcccgaggacagcgaggccaatgactacgagcagctcgagtgcgctcaacgtcgagctagtctcactctcagctcatcctgctgacctccctctgtgctggccggccgctgtccgcaggcacgtcggcgacgcgctcctcaaccgcggcaccggccgggtcattttggagctctaccctcggctcgctgtcggcgagcagacggtgagtctgtgcctctctcctctgacggacgagctcagcgctcacttgctcctccaccgccaggccgtcctcgctgtcctcatcgccaacctctcgattgccttcctctcgcgggcctatcgcctcccggaccggatgctcgcgcaccacacgcagctccggaccctccaggagaactatggcatccaggcggacctgcttgagtcttacctcggcggcgtttaccggcagtacggccggcgcttcacgctcgactttgtcgaacgcctctaccggccgctcgtcatcgcgtgctacgaggatcgaaagcgcatctgggcacggaaggtcgaggccgaccaaatcgccgcggcgattcaagcgaccgaggcggccgcccttgccggcgtcgatgacctcgccgagtttcttgaggacgacgacgagggctccgcaaaagcaaagcgcgaccacacgtcgctcctccaccagtatggctcgcgccggcgccagcaggtgacgtttgtcaaggtcgggctctacacgatgacggtccggatcgacgacgtcaggcagggcgcctttactgcgctcgagggcgacaagcgcaattggtcaaagatccgcgacctgtgcgtctgcactacccccttcccccccccgcgcagagcctcagcctcacactctctttctgcacgcagcgccgcgaaggatgcactcatcaacttaggcgtcctcaaagccgacaagctgttgaccgcacccctgcctgcccggagtgccgctctaaccgacacggcctgagcgtctctcctgccgctccctcgttcacgccacgcttccccttcctgcacgaccttaacgaccctgccactcgccctactgagatgtccaactttcctctctcgtcccaaacgtcgaagctagaagggagcgcggcatcgatcaggcacgcgagacgtcgtggaaatgacccgggcgggacgtgcaatcgacagagcaccggtcggcagttgaggcggggtggcgagacctggcgggtgctagcgcactcccgtagggcagacggggaggctcgacgtgcttaagaggtgccggagagcgccctgttgcgagacggttgcagtatcgccaggtgcgcctagggccaaagtaagggcgcagatatcgaagaggatgtccggaggcgggcacatagactcaagctggtgcgggccggtccgcgaggctctcgaggtgctcgagcagcatgtctgcgagcctagaaagtaaaaggggcaaggtcagcctcccttgcatcctgaacgaaaacgagacagacgtacttggccttgacgctccgccaatcctcgccgggcgcgccctcgagctcggcgaccttgagttcgtccaggtagaccatcccggcgttgacgtccgacttcgtaaacgagacggccttgccctgcgcccgggccattgtctgggcctcggcgagcctgggaagaagagagatgttagtcagggcgagactgaatggcggtcactgcaacgcacgagttgcgcgggtagacgatctcgtccatgtcttcaatctcagtccctaccggcgtcgccgtcccgctcttgactcgcgtctgccggttgttcttcttgtctcgcttaagatggcgcttggcctcctccatcagcgcgctcgcctccttccgatcctcgtacgcgaggtggatcatcggcccgatgacgcccctgatccacgcctcggccgcctcctcgccgagctgcgtctggacgccaccgagatacgactcgaacaggtcggcctggattgacgtgttgcgcgagagggcgaggccctccgattcggccgccagcagccgcttctcgagcccgtacgtgtgcgagaggacgcgtaggacgcgatttgtgacgattgcgtcgtgctgaggggcagcagaaaagcagggtcaggacgtcagagacgctctctgtatcagaaaggtcagacactgaccatgtaggtgcgctggagcaggcgccaggcagtcggagaaggagaggggttagcgctcatcgaaggcccagctgcaacgcgttctggtgcagaggtgcgcacagagccctccagggttgtcctgccgactgacctgtccgacggctgctcagaagaggggcggcagcatcgtcagtgatgactcggacgcgcgagcaagagaccgcacgcacccagccgagggtagagctcgtcgatgtagagggtcgtgatgaagctgagctcccagtcaccattaagcctgccgatcaggacgccggtcagctcgacagcgagacggccagctgatgcgagcgacgggcactcactcctgtcgctcatagttcaacgccttgctgccctcgggctcctcaaagccgttgagctgcatgcctcggtacgaccggtgcgcgcggacctcctttgacaggggtcccgtcagcttcggcagcggcggcaggtcttctggcgtgagggcagcgatgaaggcctcgacccgcgggtggacgtggcggaccatggcagcgtggttccgagcttgcctgtagctgcgatgggcaggtcgcaaaggcgggtcggggtcagaggtgcaggagggcctcaaacgcgtgcgtctcggcttgcccctgtcgccctcggtccgacccctcgacgtccaactgctctctccacccccgccctccccttcggacatggcaacgcgatggctgccagcagtcccgctcagacgccgctgaaaagcattgccggccgtttcggtcatctcaagtactcgcctcggccggcctgcccgtcgtcgccactcggcatcgccaccgaggtcgttgctgcgggcagcggcggcgacagcagccagcgacagtttgcctcgccctcaatgacggacgccaagccgatcaaaggagccagagcagcggccgatcagatacccttctttgcgacgccagccccgggcgcggtcaaggtcgagaacacagagagtccctccaagtgtgtcccgatccgccgaggaacgggcggcgcgcaggcctcgtcgtcgccacaagttgacgacctcccctttcctgaccttcaggagcagctacttctctccgagcgcggccgcgtcgtcatcgggcaggaagcgcaaggccacaccgaccgcgtttgcaaaggacgaggacgaagaccaaggcggcggcggcggcttcattcctgaccttgagcccgccccgccaaataaggtcttcgccaagtaccggccgtttgcctcgccggagaagtacgagcacctcccggggacgaccgaccacatgtgcgtctatcttgagtcggtcatcctttgagagtacaggctgaatctgcgccggctcccagctcattcgagaatgactgccttctcgtcgggattaagtgcgtcctgccgaccgcaatctctcgcactacggactgaccgctgcaacttctttgttcagcccgggcgtttcgtcggccgcaaagggccaccactatgccggtccgacaaatcgcttttggccctgcgtgcaccagtctggtctcgtccccgaggtcgtcacctacaaggacgatgcccgactcccgcacgactacaacattggcctgaccaacctcgtctcgcgcccgacgacggccgcctcggagctctctgtcgcggccgacatgcggcctggcgtcccgcttctgctcgccaagattctccggcacaggccgcaaatcgtctgctttgtcggcaaggacatctggcgcgagtttcgcttcgtcctcgccgcggccgaacggcgcaagacgggcaagagcgtcaagaaggagcaggctggctgggacgagcctcgggcgtggaaggtggtccacccgcaagatggagctgggcaggtccaggcgacgtacttttgggcggtcagcagcacgagcggcctctgcagagatacggtgcgtcttagactgggtcgcagctgcacgtcagctcgctgtctgacacgtcttgtgttcgcagatggaccagcgccgggccgcctggggaaagcttaatgacttcaaactcgagctcctccgccggcgggccgccaacccagactcggtgacggcgaccccgatcgacgattgcgacctcggctcactcgccgtcatcgacgtcgaggccgtctcggagtgggcgaaagactggcaggacaagctttcggccaaagcggcggcgggcagcgacggcgggagcggcggcgaggccagcggcagcgagaagacgacgacccggcgctgaaggaggagcgataaaaaggcattcttctcgatcgacccggcgctacctcaacggacgatacccctctgccctatccaggctcccgcggagatcctcgcgcgactcatctgcgctatcccgctcgccagacgcatccccttctcctgcggtgtccattagcctctcgcggtcgcctctgcccttgctgctcccccatcccaaaggagcagcggcgccgagtggcaggctcttccgcgactgacgcaggaggtcggcaccgccctcggcgacctgggagaaggcgcggacagactggtcaaacgtgctgcgaaggtcgtcagagtggaggccgccgccggtcgagagcgaggcgcccttgccggacagccgagacgagagcgaggtgtgccggttgatgctgtacccgctgctgctcggtctcgatccggtcgtcggtttgctgagcgacgagttgcgccggaccggaggaggcaacggcggatcctcgaagactgccgggccggccgtcgagagcggaaaggggtattcggcactcagctcggcgaggggtgaggactgggacgtgttctgaccgagcgtgtgcgatccgaccttcggtcgatcgttcgaaagctccggtttgccgtagttgagcgtcgcattgaccgccttccacttgctgctgctgccgacgctgctcccccgccctccactatgctgcgctctgatcgtccgcgccggaccgcgctccttagtcggcgatgacgacccgatcacttcgatgtgccgcgccttgtcgggcgcgagctcagcctcgcgccgggcgtcttcggccgcggcgagcgagcggtggacgagctcgctcgtcctgaacgcgctcgagacgcggcccgtcgtcaggccggctggctttgcaggtcgggccggaggtggcgcctttttggccggcgagcggcggacctgcggatctgcggccgagctggtcgacgactgcgtgtaactctggtctgagcgaggcggtaggggcggcgcatgtctctgtgctgccagcggggtgttggtggtcgacgggggccggggatggagcgaaggagatcgagaagccgatgtcgcgtcctggccagtcgacatggtccggaagagatccggcccgaggaggggcgcgacaccggcggaggctggcaccgactggagccgagctcggaacggattcgacgaggcgccgccgtcctgagcaggcgccggagaggagcgcatgtcgtttgtgagacgcgcgtcggtcacaggcgaagccttcaagtgccgtcgaccgaccgactcctggccttcgtcgtccgatgatgacgactcgtcgctgctcgacgacgggctgtcgtcgtcaatgaccttgtggaggtactccgagtcagagagcgtcaagccctgcggcgagtcgctcacggggcgggggacagggacgttgatgtccgatagcggagccgtcgaggaccggctcggagggggcggcggcgccctgagcgacgcgcggcggtgtgggttcggcgagccaggtggcgtgccttcgactgatatcgcgcccttctggtgtgctgacggtcggcgatgcaggtgcagcggcggcgggggcggctttgcgtgcttcttggcgaggtatgatgcaaagagcgaccgggaaggcgcctgattgagctcgatcggcacggccgctacagccatgcccagccaatcaagcaacagcgtcagcgcgcatcgcacctcggcttctcaatatcagcacgcaccctgccggaaggcgagctcgagcccctcggaacgcgtatcgcggccggtcgaagcatggacgacgaggcgcagcaaggcgaggacctggcctgcggtgagcggcgcaagcggccttagatggctctgcgaggtcgagtagcggggctgaatggccgtgtgtgaaggatggaagaggctgaggatctacatgcgcgagtgccagaagagcagactgtcagcgtctccggtcgggcgaacaaaggaaagaaggagcgacggacgtcctcccagacctcctcgtcgacgcgcaggcgctcgagcaggaagcggccgacgtcgtcgacccggatgtcggttgcaagcgactcgggcgaaccgaccgggaccactgggccggtcgtcggcggcaggagctcctggagccaaagcgttagtgggccaaactcgtcgggcgagagctgccagcgagagaggggcgacatgaaacggaacacggggtcagcctcggcctggcctggctggcatgcgagatggacgatagttgagaacggaccgcagagtggtggagaaagagtgggcgtttcatgaggcctgtcgactggcctggatgttgttcagctggagctgagggagatgggggtggtaaggaggcgtcactttcggggcaaggcaagcaagcaggagggcgtcgtccgctggcagccggcggttcgcctcgccttgacgctgccgaccgccatccatcctcacaagccgtagtaggtccctctcgctgtctgccatcagtccaggctgaggctgcagacactgaccccgatctggccgtcctcgctgcaggctcaactctccgtctgagcttgccatcgcctgtctaccgcccgctgccgccgccgccgccgccgcccgagagccgaccatctcatcctcccagactcaactcgaacctgccttgccctcaagatgccggacagcgtcgtcccgctcagcctcgatccgagggaaccgccgccgtaagtattccttcagagagcggcctgcgaccttgtctcggcggcgagagcgagaggagccgccctcctgccccccagcttgtttggccttcgcccgcgttgggccggcagcgagagttgatctcaatttggggacgtcaagaggaggattgctcgcttctcctgccaatgtagcgacgaaagctgacgcagagcacttcatcctatgtcgcctcgacctctgcagtcggtcgagctcgcggccgccgacgcgttcgctcacgccgcagcacacctcgcggcccgtctcgccgcatccgccgggccactcgcccctcccaccggtcggcggcggcggtgggcatcatgccgagtacccgccctcgcccatgtcgtcgagcctgagcggccacttttcgcagcagcagggccgcgaggagggcgaggacagctcgatcttcgagcgcgacgtcgaggcggccgtgccggtctcgctcgggacgacgacgccagccacggcggcggccgtgacggctccgccatcgccgtcggcctcgccgctcggtcggacgacaggccagcatcaccacctccattcgacatcgtcaccaacggcatcgtctcacgtccaccatcccgtcacgcgtgcgtcggtgaccgaccggatctttccgacagtcctcggtgcgcagcgcgtcacttgtcgctctactcaggcgctgtactgaccgccgttgcaatgcccttcctcccggcagacgacgccgtcgaggccctgacgtcctcggctcagggcggcggcgacgtctttgtcgtctcggcctcgcagacgccctcgcgcgatcactcgccctcgcgcgtcttccggcgcgagccgcgcgaggcgagctcgatgggcagcagcccgcaggacgcgcggcaccgtgaccggcgcgagagcggggtgtcgctccgcggccaggcggacaagctgcttcactcgcagcagcagcagcagcagcaggtcgacggcggcagtgccgtcgggtcgccctcgcctcggtcgtcgcctgaacccgagggcggcgcgcaccacctccatcagtcggcctcgctcgagggccggctcgcccagctcgcctcgtcgccgtcacactctcctcggctaggccggtcgcctgcccaatcacctcggctggcacctcacgtcctctctttgccgtctaacaactcggcatcctcgatcccgtcaccgtcgccatcgtcgtcggcagcctcgccctttggcggcagcatcggtggcggcgggccgattccgtcaccctcggccgtcccgcatagcctgagcttcgtctcgccccaggacctcatcacctcgcccccgctctctacccagtcgctctcgtccatcacctcgggcgcctcgctcctcccctcggtcgggagcgccccgagcgaaggcggccacgacagctggagcgtcacgtcgggctcgcccgcgccggccggccagtgggagcgcggcgggctcggcaagggccttgaggagcgactcgaggaactcgccgtccgtgagaaggccgccggccgaacaatctctccctgatcagcgacgactggcgctgggtctggccttgtacctctttctctcttcctcttgtatgcgcgttttgcggggcttgaagcttcagacatgcaaggttggcagcctggaggagcgagtgtacagacgggggaggtattgcgggggagggttggcggggctgcgaagatggctacatggagagggcgagcgcagaagggatgcaggttgcaggaggggagagggaacaggtcggatgcttgccgcctcacataaaggtcgccatcagggccgagaacatggtgatgatccaggcggaatagagggcgccgaccccctcctcttcgtagatcgtcttggcggcgtcctgcacggaaaagagaggggtgtcagctcgttgcaaggtcgaaagcctcagcaacagacgtcgcacgcacgatcaggccggtgtaaggctcctcctcgctccggaggccgacgacgtcctcgtccttggcggcatactctgaggggatctcgcccgtggagacctctcccggcgcattctgccgctggacagagagccggacggcgagaacctcgagcgggcagctgcgtcgcgcggagagacgagagagagtcagcagcgaggccgggaatagcgcaaggggaaaggcggcctacagaacgagcgtcgacgctgcctggaaagcgaggaagacaaagagccggccggtccggatgcgggcaaatggcccgtcgcgagacgagctcgggtccttgaagatgccgtttgcgagctcctcgacgacgaccgagcgcacgctcgaggcgacgaccgtcacccagaggatcgcgagcgtcgtcgctgcgagcaggccgggcgccttgaacatgacccacggccgcgagcgctcgtacggtgtcaggaggatgttgagcgcggcgaccggcgaccagggaaggaggtgagcggtgacgatggcccggttgatgatgatggtcatcggcagactgatgacggccatggccgcgctgaagagcgtcatcctgagagaggtcgcgaggcagggaaggtagaagtacgtcagacgagctcgacaatcgggctgacttctcgtgggcggcccagccgcacctgaggccgttcgcgtccggcatagcgtaggtgcccttgggcgtgagcgtgctcgacgagccgataaagacgatggccgcgagcgagccgaggacggacgagacgaggatcggaccagtgccttgttcgtcacacaattcgtcgcaaagagcccggggtcagtgggctagctacaggactgcggccggtgagcccttgatgttgcccccctcccctgcggacgtgctcacccttgaacaggcccgggatgccctcgagccgccggacgcggacaaacatgccccagatgccgcggacagggccgacgggaggcgcgccgccttcagcttcgacgtcggagagggcgaggccgctgaatttcattcgaggtgggtgattgatggtcagcttgcctgctgcctgcgaggcgtagatggccgaagctgcgagctggaaagccgacgtaccgaggggcatagttggctcgcagacggacgacgacgccggtaaagggctgaccgatgagaacgcaagcggagctcgtcagcaagcctgcttgaggagctgggggtgagagcctacagcccgatggggaagacgagcgagcagccgggacatacgacgacgatggcggcgctcatcgcaaacgacaagaccatgaggacgacggcgacgagcgccgcaaaaagaaactcgaggatcggcattgctgcaggagagatgttggtatgaagggagagggcaagtgaagaaggaggaggttgccgagctgtcgttcgtggtggcggtgagggggagaagccaagcgaggtcaacgctggcgggtccgcttgcgcgcagcagaaccgcaggcgtcgcacccttccggcaggccagccaaagcgtgaggtctcgcaaagtgcctggaaagctggcagtcaacacccaatccaagatgacactcattcaatataagctagagctggccgcgtcaacgccggccgccgttgttctgcccgccggcgccgccaacagctccagcgagggcacccagcacatcctggacgttcgccccgccaagtgcgccctttagctggtcgaccgcgtcggcccctccagcagcgccgacaatcttgctgagaaagtcggcaacgccgtctgaccccgctccggcggcctgctcgttcttggcgccggtcgcagagttccagaggtcggcgagcgggttggccgctccagcagtccccttcttcgccgtcttgcttcgcgaacgcgtgccatacgccggcggcggtccatcggccgtctcgcgctcgcgccgctcacgggccttctcgcctgccgcgctgtttgggaagagccagccagccgcttttcggacgttgtcgcccgtctcgccgccgacaaacatcgagagccagtagagagccgagccgctgaggccgccgagtgcaccggcagagtggacgatcgtcgagagcgagctctggagcgagcgcgctgggtcggacgaggtgcaggcctgatagatgatgccgatgatggcggcgagggagccccacttggcaaagaagatggacgagctgaaagaggatcggtcaaagagtcagccgggagtcctgctgagggagcgacaagggattgagagagggtcggaccggtaggcgacgcggagggtcctgaacatggacgtcgcggcaaagtagaggccgatcaggctgacgagcagcggcgtctgggccttgagaaagtcgacgacggggccgcgcgactcgccgctggcgtccgactggaacgagcgcagaaagttggcggcatgcggcgcgatgggcgccgggaggaagctgcaggcggctgggagagggcggaggcagctcggcgtcggtggtcagccggcaggggtcaagcaaggcggaagaagcctttccagcgaagcgcaccttggatggcaaagtccatgtctgtccggtcgatggcttcgctcgaggatgaggtgatgggtcggtggtcgaagcaagcaggaggaggaggttcggagggtcgagccggcggggtcagccaacgcacagggcggggaggtcgatcgatgacgcgcctctctccaataacccgtgagtacgcaaggcctgacctacttgcgcgctcgtcaccgacacagcgcgcggaccgcgttgccggcaaagtcagcgcactagaggatgtcctggccagggagtcgtccggacggaaggcagccttatttgcgactggttggttgctaaccgggctgacctatgtgcggagtcagcctgcggacgtctccttttcgatcgactcactcccagtcgcggcatcgagatgatggggagcatttacatagggtctcctgacggccgctccctgcctaggagacaatcgagctcaggtaggcatgaaaatcgaatggcccgccgccttgcaagcgcaaaggaggcgcagaccgttcctcagacgctggcccggtcctgctcaccacgggacggtctggccgtgctggtcgacgtgcgagcccgtctcacgcgcagggctcaagacaaaagccttgaagaaatcggctgcggcctcggccggcgtgctcgcgcgcgtcggcgtcggtgcgaccgtcgggtcgtcacggacgaagccgctgtcggtcggcaaaagggggggggggcggaatgggtggtcagccaagggtctgcacagaaggggctgctgatggagcgaccgacggcgtgaagatggcgacgttgatgccctcgggcttgaggtcgagcgagagccgcttgaggtagtggatgagcgcggccgtcgccgtcccgcccgaggcactgcacactgcctgtcggccccggctgcggcgatacgaagagacgcaatgaaatcggtcagtacaggacgtgtaaaagatctggacaccgagcgggcgaagcgcacccgagaaggccgcacgagcccgcgaccgagctgagaccgacgaccttcttctgcttgccggcccggacgagcgggagcaggcaccggacggcggtcgccgtcccgccgacgaggacgtggagatcgtgctcgagcttggcgaagtcgctggccagccgagtgagggaggcttgaacgtcagcgtgcgtcctgggcggaggggggagtcgtcgaaaggcggacgcacaagttggcagccgtgtcgcatgacgagcagacgtcgagcccggtcgcagcgccgaggaccaagacgtctacgccatactgcttaacaaagccgacctctccagcggcggcgagcatagctgcctcggtcgtgggtgtgtcgataacggcaagccgatccttcccggctttgctggagatcgcagcgagctcgagcgcacgctcggcgcagggagggccggtgcagagagcgacgacggccgactcgggctgccggtcgagcaggcaagcgacgagcgccgtcccgaacgacgtctgggagtcctgcaagaggcgagggagggggcgagggcgaggggcaaagaaaggggtcagctgcaatggccggccttgaacccacgtccgacaaggggggtgctacggtgacgaggtagacgaccgggctgaagggtgcgttaccaccagagtgcgaggccatggctggagagcggtcgtctggatgagaggagatggtgggcagggggagggtaggtcagcagtcagggtgtcgcgagacgaggcgacggcgcagcaggtccgccttgcccactccgccctccatgcatacagccatctcgctgcgtttaaaggagacattgcgatcatcttgcgatcggaagatttacgagagagaagggagcagcgatacagtgagcttggcagagagaggagaggggtccgggtgtgaaagagaggtgggcgtccgactgaggacgcgctctaacccgacgtcgcaggcgtcttcgagccagcggccttctcctcgcgcttggcgtcctgcttctcggtacggccaggcgcctgctcctcgaccttgccctggtcgaccttcgagtcgcccggcgcctccttgccgctcttcttgtcgccggcggccgtgtcgtcctccttgctgccgtccttgcccgcctggggcttgtcgctcggcttgggcgtcgccgagccagcggcgtgctcgtcgcgctttgcatcctgcttggccgtccggcccgccgcctcgttcttttcctggccctcgacaatcttcgagtcaccaggcgcctccttgccagatttcttgtcgccggcagacgtgtcgtcctcggaggccgccggcttgggcttgtcggccgccttcttgtcgcccttgtcggcggcgccgtcagcggcagccttcttcttgtcggccgcctcctttttctccttggccgccttggcctcggcctccttcttctccttctcggccgtcgctttcttctcctcgggcgtcgggacctttgcgattgacaggaagccgccctcgctcccgccccgctcaatcttggccccgagcttctcgagctcgctcttggccatcgtaatcttgccctggccggccgaggggtaggctgggtgccggccgccgtgacccgtcgtcatcgcgggcgaggcgacgtcccacttgttgagcgcaaagagcgaaaagaggatcgagccgccggcgatcgacgtcaagtagaagcggtaggtcgagtaccacttgggggctggccagggacggtaggtaggtcagtcgcagctcttacgggaccagcgggacaggcaggacgcactccagccctgcgagccggcccagcggtcgatcgcccacgagaagaggaaaccaccccattgggcgacgagcgccgtccctgggctagcgaggtagagcgtcggccatgcgtaggcgagcgggacgacaccgagcgcgagactgaggcagcggaacaacggcgcgtgtcagccggagctcccgaagagagtagggagaggcgggcgacgcaccgcttgtggccctggcggccgccgaatttagcaaactccatgccccagtgaatggcgccgaggaacgagagcatgacggctccatacgtgatctggaacgactggacggtgtggagcatttcgagcgcctgggtcgcattctcgccggcggcggcgaggttgacggcctcgcgcgcatagtaggccgtaccgagggccatgccgccgtaggggatgccgccggcgagaccccactgcatcaccgcgggcgggacagcctggatcattgtcgtcgtgacggatttctgagagcggcgagagaaaatcaggctggggacgacgaggatgtgacggcgatcggggaggagggaatcgcgcacatagtcgccgctgagcgagccgtcctctcggagctgaccgtggccggcgatggccgtcgcggccgcatcgccaagaccacctgcaaggtgcgagtgagaggtaaggaaaaggaggcagaggcaagaggtgccgcaaagcaagagcgaggcgatgacgcaaagggacaaggaaggggtaggtggatcgtcagccttcttttctcttcaccagtcaagacggccagaccggctcaactgccagccccaggtctgccaccagcgcacatccaaagcaagaaggacgagagggacggaccgagctcctcgcggatgtttgtcgccgcatgctcgaggtcctcggctcctggccggttcgacacctggccagcggcgaagcgggccgagaggaggctgttgccgagtcgtgtgcgggcgacagagggtgtgcggccgacgaggcctggctggcggaggagtgtgcgagggaacattttgccggatgaaaaggggagagggagggagatgaagggaaggatgagcaaggcctgggctgacgagatgaagagtagagggcgagatctcgcgcccgcgcgtcgtcatgaataaccctaggtcggcagctgatccccgatccgcctggcagatcgagcaacctcgttgacctctcgccgaccacgacgaccagctctaagtgacctcgctccctcgccctcgccctcgcatgccgccgctcgtccgccgcccgctcagcggcctccagaaggtgcgcatacagccatcgcgcactccctctcgcccagctcgctgaccgcctcaccgaccccaccccgcaggaggtcctccggctctacaagcgctcgctcgccctcatccggtccaagccgccttcgtcccaagccgacttccggctcttcatccgttatggcttccgccaccccgtcatcgcagcccgcgacgtctcggccgtcgagcatgcgcttcgaaccggcggaaggcgcgtcgagatgctcgagaaccagggcgtcaagcgcgtcgccgtcagtcgggcgatggaggagtggtgggagggcgtgaagtggcggccagcctcggccgagaagacggcggcgctggaggtcgagacggcgcagcggacggacggtgcttcctgagggcaggacccaggctgagggcttcctcactgccccagccaccgtcagtcttccctcggtcgtcgagcatgccgaaccgcagccggaggttggccggccgaggaaggcgcggaatgcagggcgcgcttcctgcgcaatcagttccgcctcttaccggcctctgccgcagacggaatggcccgcttcctcgcgcgacggcataccggcgattctctcaacggctgcacgtcaccacgcacgacacggcacagcatcggcccgtccgacagttgtggtcgttgtcgttggggctcctgattcgttggccgctcgagtagccagcgctcgactctgggccgaagcactttgaccggcgggcacctcacttccctcgtctggcagggtggctggctttcgttgagaaggggaatacatggccgcatatgtcacgctagccggaggagggggagaattgggctggacgccgaaggaaagagaagggggggcggcgtggcgacgccaaaggcaggcgaatgaagaaggggaggagagcagagcggcagggaaacacccgcccttactcctgctcgtccgcgacaaacgagaagtcgccctctccctcggcctcgtcagccgcaggcgcgacgccggccttggcgatcgcctcggccgaggcgtagtcgacggtcgcgcgcgtcgagcggcgcgaggtcggcgcgaggatctgggtcgggtcgatctcggcgaggtcctgcgtaggcgggcgaagaacgaaggatttggacagggagaataagggtcaccttgggggaatcgagcgagatacctgtctccttatacacatctccgagcccacgagactagcgctcatctcgtatgccgtcttctgcttgaaaaaaaaaagcattgctggttggagagtttcgagatctgccatgcagagacgaggacggaggtgaccggccgagacggcagcccaaaggcaacgacgcgcgcagctcctccaggcctcgaagacggccggctcggtcgcgccacttcttgccacttgaccatgacctcctctgttcttgtcctctctcttcgctcagccctttcagatggcacctaagcggcctgtctccgctctcaaggctctgcgccaacagatggcgcctgtcaagcgggctcgccgtcgagaggtttcgtcgaccgacagctctgatgacgatgaagccgacttcgtcccgccctccgcccggagcagctcgatcaagccggccgcctcgcaaagcggatcgagccctaggtcaggcttggtggtcagcggcagctccagtaggcggaggctcggtgtgccgtcgccaaacgagacgttcgtctcgtcgcccaacggcgtctgcacgcgttcaccaccaacctcgaccctcccctccctgcagcgcttggccctgcgttcgctctctcggggcgccaagcagctccacctgccaaacgagaagggcggcggtctgcgcttcgacgtcgagagatcgcttcggcggctgccagagcacctccgattgctcgtctgggacgcgctgcgctcgtccggcagcggcttcatccagctcgacaccatcctcaaggtcagtgcaattccgctcgtcaagagcgtagctctacctttaggatgtctgcgctgacattgatgcccctccccttgtccgtcggcgcgtgcctcagcactttatcgccctgccccgagtcgtcttgacggccgagctccctgccctcgacaacctgcgcacattgaccatcatccccttcgccgctcagacgactagcctcattttgaccggtctcgagcgcgttaaggacgccgaagttgccgcagcagttcgcaagatgcctgcgctcgagcacgttgacctccggtgcgtctgctttcaactggatgtccttggtaccgaagtgtgaccctgacgtcccccgtcactcggagagtagagggacggcagatgttggtacaaagaccgttgacgccctgcagactgttgctcgtcaccttcggtcgctcaacttgggcgagacggtcatacgccttccgtctctgcagccgctgctgcgggacgctcgccggctggaatcactcaagctggccaacgtcaaatcgatggtgcgccgtacaggttgcgacgcacgattgaaacaagctgacctgcggcgcgctcttctgtctagaacgatgcctccttcggcaagcttctcgatgcgctggccgacgccgatactgatctcgccccactgggctcggctggctcgccgctcgccgctctgacgaccctcaagctccgaggcaacgtcagtctccattcttctgcctcgctctccgtttctcttaggcggctgctgatgcacgaccgcctgctgcgtgcaggacctctccagcgcgtcgatcgaccggcttctcacccgcctcccctgccttctgcgtctcgacctctccttcattccggctctgcgcacgatcgctatcccccccgcagtgatcggtcagctgcaaaagcttcatctaaccggctcatcgctcgtcccagctgctctcctgcagcagctgtccgaggctccgtcccttcgcctcgagactcttcacctgggtgccctgcaagtccaaaacggctgggcgccggccgacatctgggctcttggcgacgtgtgctcgcgctcaagctcgtctctgcgcaagctctgcctggccggcaacccggccctcaccggcaccgccctctcgagcacatccagtcggccgaaggtcgaggcgttcagcgcgttgatgctcggcatcgctcccttcatcttggttcgtcttgtcggcgacctcatccagtgccccgctgacctttctctatcgggcctccctcagcatctcgacttgtcactcgtccccctcaggtcggactacctctcggcctttgcgtctccagccacgagtcccgtctgcgagctcgtgctcgacgagactggcgtcgacgccgatgtcagctcggcgctgtctggctgctcctcgctcgaggtcttgcggatcaagaattcgaaggtctcgcgtgcgtcgccggcaggcaagcgagtctcccaacgcgtacggcgtgtctgacccccattgtctgtcctcatagtcgacacccttttcgccatcatcgatcactcaccgaagcttcacacaatcgacctgacgagctgccgaggcatcccgctaaagcagcggcgaggcgtcttcgaagtcggttgcatctcgtccccactctcagaatgctggactgacccgccacctcacgacgcgcaggcatacgacgatgaggcatacgacggccggctctccgcgagaaggaaacgataacttgagtctcatctgtcacgcctctttgtgagcatgggtcggcgcaggcgagggggcagtgagcgacaggcgatatgcctcggcgccagaggcctcgacatcgcgttgtaggggttgagacgcttgaacgctgtgctttgactcttccggatgagcttggcccatcggctgcgactgagcgtcctcggcgcgggtgtatagaggtctccttgccgcgtgtgacatccgttgacaatcgggcaggagcaacatagcactgctcaagaagacgccgggatcaggtttccagaaggcagaccgactctgtaggccgtgtcagacgcaccagcagggccttcagaatggggccgacgagccgaggtacttcttcatcacgctcgccggaacctcgatgaccttgccacggatcgtttcccggcctagccgcttgtgggcttcgaatctgggcagtatatcggtcaacgcgagcgcgtgtgtgtaccagagagagagtgggacgcaccgatggcagcctccgagtgagaagtagtacgactggtctgggttggccggactccgcacgcggaggacctcgatgggagtgaactcgtcccctcgctgcgacaagaacgaccgcgagtcagcacctgaagcagcgaggggactggcggttgatttgattacctcgacctcgcgcacaaacgtctggaccttttcctcgtcgagcagcgacggcagcggccgcacgatgacgctcatcggcactgtcggagccagtaggtcgggcgtcagggctgcatgccggggctcaagcaagtcagaacgacggaccgttgtgagtctccttgacgccggcgccaaaagcggagaacctagagggctccatgccggcgacagctgcggaggaggatgaaggaagcgagcccgacaggccgtcgcttgaggccgtcaggtcgtcaggagctctcgagctcgggctcgcagcgttcgaggcagcggacatggcgcgaccgaggacggcagttgcagaacttgagcggcagatggggagcaaagcgccgagggacatccaagtgtagcaagtgggaagaaaggaggatggtcgtcaggacgttgacggcgagctggcggcagagggctgacgagagtagagggcggcgcgcagcaactgctctctccctccgaccatgtcggacgcatgcccgcccgaattctcttctttcactcgcaatcacgggttcgttccaaggcacatgtaatgggtgacgaaagatcagggctcgagccgggtcggatcgcgggggaagagcgaggcgcggcggatgttgccgaggttgaggtagaactggacgatccgctcgagtctggtcgaaggattgagagcgcgacaggttagcgcataccgtcaggggtagaaagggcgagaggcggacgcacccaaagccagcgccggcatgaggcgggcagccccagcggaaggcgtcgacgtaggccttcattgtgtcgggctcgacgcccttctcgcgcatctttgtctcgaggaaggccgcgtcgtggatccgctgcgcgcccgagagaatctcctcgccccgcatgaagaagtcgtacgagttcgagtagttctgtaaagggacgcggtgagagggacgggtcagcgggcgcgataggcgtcaaatgggccagtcgcagactcaccgggttgatcgggtcgggcatcgtgtagaacggccggacggcgagcgggaacttatcgaggataaagtagtcggtgtggtacttctcccggacgagccggccgagccacttctcgttggccgtcctgggaaggcatcggattgatgtcagtcaaggaaggagggggtggcagggtcgaacgcacgataggtcgtcaaagtcgccgagcttgttgccctcctcgtcggtcgcgccagcctcgcggagcatggcgatcgcctcgtggaactggaggcggaccgtcttgtccgggataaggaactcctcggtcgggaactgcttccggaccgtctcgacttcaggccggaacgtcgtcttgagctccttgaagagcgtcaggaggagctcgtcgagaaggtcgagcacctcgtggtagtgcgagtcaaaggccatctcgagatcgaggcccatgaactcggtcaggtgtcggtgcgtgttcgagttctcggcgcggaagactggagtgagcgaggggtaggttagcgcagggttgatcgcaactaggcccgtcgacaatggcgcgacgcaccgggcgcgatctcgtagacgcgctccatgtcgccggcgatgcacatctgcttggcgagctggggcgactgggcgaggaaggcggtgtctgcaaagaggccgtccgcatgtcagtcacgagtcgcagacggcaaagcttacgggacgagacccacccttgaagtagccgaccttgaagacgctcgcgccgctctccgtcgcggcgccctggagcttgggcgtgtggatctcgacaaactgcttcgactcgaggaagcggcggaagacgccgccgacggcgctctgaatcttgaaaatggcgaggttggtgtcggtccgaaggtcgatgacgcggttgttgagccgggtctggagcgagacggtcgcaaactgggcgtcctcctttgcaaagtcgtcggccggacgcgaggcgtcggcgtacgagatcggaagcgtgaccgtcggctcgacgagcgtatgcatcttatggatgacaacctcggcgtccgagaccgaggccgacttgacctcctcgaagggcgccttgaggcgaccctcgaccatgacgatggcctcagtcgggaccgaggcggcgtacttgagcatctgcttgctgatctggtgctcggcggtctcgtccttcgacacctccatcagcgcctggatcgaatggttctgctggcgcaggttgaggaagaccatcttggctcctgcaggggtcgaaggtccttgtcaggtcgcgtgccatcgcatcgagagcaactgtaggggacgcaccctgcgcgcgcgtgttggtgacgcgcgcccggaagtagacggtctcgccgtggttcttggcgctgatgttcttgaggagcgtgcgctcccggccgtccttctcggccgactggtggagcgggagcttaccatagttctggctcgcagagtcctggcggcggtgcggtgaaatgcatctcgagtcagggctctctccctccggcgggtcagcccacacgcagcggcggtcaacgcacctgcgagtccttgagcgccttgacacgagcctcctcggcctcgatcgcggcacgacgggcggccttggcagccttctcggcgtcctttgcccgcttcttgatctcgttcttgctcaatggcttgccgtcctcgctagtgagagagggccgagcagcgggcgtaggagtcagccctcagcttcactccgccgttccttgcgcgagacttacccaagcgggacgtcggcagcaggcgccgggttggcctcggcaggggtctgggtgggctggttcggggcagacatggttcgggtgatggttcggaggtcaggccggccgtctttttcggccgccgtcctgtctgtccgcgcgggctgcagcgaacgaagctcgtagagcgacgctctgacgacacgacgcctttggtcaccgaccaccagcccattttctcctcaactccctgaaagagctctatcttgctcgcgagatatggcctctcgatatccggccacgcttccggccgttctccagcggccgctcaacgtccacgccctcccgcgcgaggtcctcgacggcctgagcgttcgagcgtcatcgatcgtctcgggtgcctcggcgagcggcccaggaggaggcgacgacggcgcgagctcgtcctcagcctcgtcctcgggcagcgacagcggcgacgaggacgacgacaagatccccgaagagcagttggacgatgaggaggacgcctcggccgccttcctcgccgccaagttcgccctgcggacgccactcatccagttcacgccggccccgacgctcgcgcccgatacccagctctcggtctaccgcgccctctttccggcctcgctcgaccggccagaaagcttcctgccatacctgcgcgagctccagctgacggccggggacctcgtcccgggcgaccacgagcgccgctgggtgctgttgatgctcgccggcggccacttcgccggctgtgtcatcgccctcggcggccggcgcgaaggcaagaaggctgtcaagggccaggacggcgagcttcgggtgctcaagcacaagacgttccaccgctacacgagtacgtcggcgtcgcccgctctgcttgctgctgcaggcaatcaaactgacgtcgccgtgctgtatgtgcctcgaaccagcccgtcgcaagcagggaggctcgcagtcaaagaacgacaacgccaagggtgcggccaactcgatcggtgcccagatgcgtcgagcgggcgaggtcaagctcaacgaggaggtccgcgccttgctcgagagctggcaggacgactttaacgcggcagagcgcatcttcatccgcgggagtgttagcgcgaagaagactttctggggctacgatggagcggtcgtcacaaagggtgcgtcagacggggaggctcggcctcaacgttcctctcgttgctgaagtcttccgtgcaacctccattcagacgatgagcgcgtcaagacgttcccgttcccaacccggcgaccggccctggccgagctcatccggtgctaccacgagctcacgcgggtcaagctctcattttacacggccgcccagctgcacgaggccgagacggcttacctcgcttcgatcgcgccaaagccagggccctcggcggcctcgacggcacccgcgctggcagcgccggcgaagcccaagctgtcggacgacgaggagcgtctgcgggaacgctggcgacggctgctcgagatggtccgcaagggcaaggtcgatacgctcgcggccttcagcgagaagtgggacggcacgcccggcatggtctttggcggccggggcgacctccctgcctggctggtcgaggaggaggccagccggcgagaggcgactctcctgatggccgccgttgtggctggccaggaggctgtcgtccgttggctgctcgaggagaagcgggccgacccgacggtgccggttccggcaggggcttcaacgaccggcgcaagcacgggcaaggacgaagacgagacgctgcccgacgacatcgaggccgagggcgcagatgcctgcccgccgtcgacgttccgcaccgcctacgacctggcgacggccaagccggtccggaacgtctttcgccgactcgccaacgaccacccagactggtgggcgtggacctcgacgagccctggcggagcacgcgtaccttctagcctctcggccgagcaggaggagcagcagaagcagaagggcggcgagcggcgcaagggccttaaggacaagatgaaggcccgccgagcggccgcaccctcgccgccgtccgagccggaaccaccggtcgagtctccggttggagcagtcacggccgcacttcagtctgcagccctcaaaggaccccagcggcttggcggccaggggacggcggtcgacattggccagagtctccagggccttacggtcgagatgcggtcgcggatcgagcgcgagcgccgggcccgggcggccgaggcgcggatgacgggccgctaagggcgtctgcgtctttactgtatccattgctcttgacgtaacgcgagactcgaagcgagagtgtcggtgcctcctggccgctgctgcgctgacgtccgaggtcgacacccgcgaaaagccgagcgcgcgagacgaaggtcgtgaaccgccgccgccgccgccttgctgtacctcctcccacccaccgtcctccgcctcttctcataaagacaagatgcttgcccttacccgtccctcctttgtgcgtccaaggctcggctgaacccatgcgacgctgcgctaccggcgatccgcgtgttgaccaccttcgtgcgccccgtccccaaccgatggccacctcctcagtcgccggcgctctgccgcccgctgaacgctggcctcaaggtttcgccgctcaaggtcaacttccgccgggccatggccaccgaggccagcggcgactacgacctcgtcgtcattggaggaggtctgtccaccacttgtttcttgcgcctgccgatggggggatggagtcgaggagggcgcggcggcggcgacggcgcggagcggacgagagccgccttcgccgacggagctggcgaagagcctcctcacgtctgtggacgtgggccggcttggctgctggtcggcctagggctggacggctgatgtctgaccgtcgtagacgacgcttgtctctcctgcgagcctcttgctgcagttgcggcgctgccgttgggcaccgagctcgcaccgcgccggtcctcgctgggacgtgctcgcatctctccacctcggctagcaagactgatggtccctccctctgctctctttgtcaggaccgggaggctacgttgctgccgtcaaggcgtcgcagctcggctacaagacgatgtgcatcgacgctcgtggcccgcccggtggcacctgcctcaacgtcggctgcatcccgtcgaaggccctgtacgtccggccgggcctgattccctttttataggaagcggcgctgaccaggtcctcgtctcccagcctcgactcgtcgcacaagtaccacgaggctaaggcgacgttcgccaagaagggcatcgagtttgacggcctcaaggtcaacctgaagcagatgctcgccaacaaggacgcggccgtcaacggcctgaccggcggtgtcgagaagtacctctttacgaagtaccccgtcacctacaagaagggcttcgcttcgttcaactctgcctcggagatcgccatcaagctcaacgacggcggcgaggagacggtcaaggccaagaatgtcatcatcgccaccggctccgaggtgacgcccttcccgggcatggagattgacgagaaggtcatcgtctcgtcaaccggcgcgctcgacctccaggaggtccccaagaaggtgcgtccgccgtctgcgcgcagttgagggctacttgcgcgcgccactcgctgacaagtctcttcccttgcgctcgctcgcagatgatcgttatcggtggcggtgtcattggcctcgagctcggctcggtctggtcgcgcctcggctccgaggttaccgtcgtcgagtacctcggcgcgatcggtgctggcatggatggcgaggtcggcaagacgttccagaagatcctcggcaagcagggcttcaagttcaagctcaacaccaaggtcatgagcgccaagaaggacggcaacaaggtcacactcgaggtcgagggggccaaggacggcaaggccgagacggtgcgttgccgcgcgtctgtgtttcccggctcgggcgacctgtcgctgattgctaagcccccatcgacctgctgatagctcgaggccgacgtcgtcctcgtcgccatcggtcgccgcccggtcacggccggcctcaacctcgagaagattggtgtcgaggtcgacggcaagggccggattgttatcgacgaccagtacaacacctcggtcccgaacgtcaagtgcatcggcgacgtcactttcggccccatgctcgcccacaaggccgaggaggagggcatcgccgccgttgagtacctcaagcacggtcacggccacgtcaactacgatgccatcccgtcggtcgtctacacccaccccgaggtgcgccggccctcctccaccttccgcctgctcattctgtgagccgagtttgcccgggctgatcagtctctccaccctgtcaggtcgcatgggtcggcaagacggaggaggagctcaaggcggccaaggtcgcctacaagattggcaagtttcccttcgcggccaactcgcgcgcaaagacggtcggcgacaccgagggctttgtcaagatgattgtcgagaaggagaccgaccttatcctgtgcgtcagcgccgcgcaccccttgtcacctccaagcgctgacatcttcgtgctttccgcagcggctgccacatcatcggccccaacgccggagagatgatctcggaggccgtccttgcgattgagtacaaggcgtcggctgaggacattgcccgcacgtcgcatgcccaccctacgctgtccgaggccttcaaggaggctgcgctcgcggcttacgacctgcgtacgtctgctgcaatattgtcgtcttgcgtgggcagccggctgacctgcttgaccatcttccgttacccttcgcagccgtcaacttctagagaggggtgccgggttctgtttgtttcgcggccggagggcgggtcgcctgggagtttcatctacatctgcatacgaattgctttcagtcattgcctgggtcctctcctgaaaccgcgtgccggcggtgctgcgaaggacgaggacgagagcgcgcagagcaagtgcggaggtgagctggcggcctcctccgacctcgacaccgacgtcgcctttaccagctctcgccccgtcctgccgatccttgcctagctggtacactctcatcatccctgctacgcatcagcatgagcttgtcgggtgtccacaatcagctctcggccgccgcacacgccacgtcgccctcaaggacaagctccgccggcccgaccgacctcctcccgatgggctttctccgagacgctctcgccgccgtcctgcactccagcgcgccgtcacctttccagctcgtcttcagctcgcatcctgcctggcctcggcctgcgccccatccgccgacgacaggtcagcaaggcggcttgttgtcacggcgccgcgaactccggatctcgtgcctcgactcgtccttcaacccgccgaccttggcgcaccgggctctcgcgacagcttcttacacggaagcaggggatgacggcgagtacgatgcgcacctgctgctgctcagtgttaagaacgtagataaggtcctgtcgtcgggcgatgcaaattacgagtgcgttctgccgagcggcccgtgcccagatcatcctcaggtgctgatgccgctcgctcgctcgacagacagcgactgcagatgatccatctcctcgcccaagacatcctcaaggcctcacaagcggaagactcgtcgccggcatcgtggcgcaacgtagccatcggcctgctctctgagcctgcattcatcaacaaggaccaggtcatccggcgatggctgagctcgcgatcagacgctagcgagcagacggccaaggacgacgtgaagctctgctggctcgtcggcacagacacagttgagcgcttttttgatcagaaatgtccgtcctcgcactcttgcaccgggccggccacttgctcccccgcctgcgctcatgctgaccctttcgcgtcacttctctctcccgattctctccagactaccctcaaccgctcgagacctgccttccgcccttcttcgaccctccagcgtcgtgctgcttttcaccctcggagctcattcacttcgcccgtccggccgcggcgccgtcgtccgccagttctgtgccacctacgccgccgctctacgacgcgacgatcgcctctcttgtgctcccgactggagccgttcgcatcggccaaactcgcgggaccgaggactggggtcgggtcagctcgaccgtcgtcaggaagggtgttgcggccggcagcgacgactggcgcaagctggtgggagcctcgaccgccgcatacatcgagcgagagtgtctctatcggtagcgtcatgagacggcgacgtctgaggtctcggtgctaagcgtcgtctcgttcgtgtggtctagttcgtgctcgatgagatattcatggcgaggcacggtccgaacgagttgcgtcccctcgacgccgaccaggcaccccggctcctccgtcgcgtccttccaaacaactccctgtcgcccggccctggcgcgctgacctcgcgcctcgcttcagccctcgcagagctcgctgaccagtcgctagcccttcagcgacaacgaggacgacctcttcgctgctccctcctttccttcggcctgtctgaccccttctccacaggccagcgagtcgcgtccgatccaccatgtctgcgcccgagatccttcctgcagccttccgcctgctgctcttcccgctcgggctcctcctcctcagcatcctggacacgattgcccgagctcggaacggctcgcccaacgcggctcggtgcgtcaaactcgacggcctctccggccctccttcgaatacgccctgaccttcggctcatgcttgcgcattcagctcgccgactcttcagcttgcctccttcctgctcgcctcgctggccctctaccctgcctcgggcgcgacagctctcgtccagttcgcctccgattccaacgcttggacacgcgccaacagcgtgctcgattccatcggccgagccctgtgtgagtcaacttgcccgtctccagcaggactgccgcctggatctgaccgcccctggctcattggtagtctggctcgcacagggtctcttgctcgccgccctcgtcagcgacgtgccgcccacgtctcggatctgccgcatcaagacctatgccatcctgacgagtctcgtgggagcgaccggtcagtctcaatcggcccatgataccctctctgctggcagctcctgtctgaccagagtatcctctgtctgtcctcagctactgctcttggcctctgcgctcccttcgttgcaggatcgtccgctccggccttcgcatcccacggcaccgcactttcgctcgatctcacatccctagcaaccactaccgtcctcctctaccttgccaggccaatctcgtttgccctgctctggagcgcgttgtcagcagccatgggcgacatcctcggcatcctcggggcgacactgagcgaaactcccgtcggccgatggaccgaggtcgctcgcgctgcctcgacttgcgcctgggcggtggcgttggtggcgtcctttgtcggtgagtcctggacggcaccatcggcttcgctctcccagactgaagccgacgaccgccaccttggacagcccttgaggttcggaaacttcagtcggtcaacgctcaaccggcttctgagcatgacggaagtcttcatcaggcagcggccggcagcgccggccctcaatatggcctgctctcgtcgacgaactaccttccagagctgtcctctccgacggccaccggccgccttgacatctcgcccgccatgacctggtcaacgcccgagatctcgaccccgcggtcaacgtcctacacaggccacgcgagccggatctcgtcactctactgcccgccccagaatcatcagtcctctccagtctcggacgaagcagatggagcggatgacagcggctacactctcgtcgagctcgtcgccgttccgatctcgccgaagcaggccgatcttgcgaccgagctcccgcccgacagattctcgcccccgccccggccgatctcggcccgtctccgaccatcctctcctcggacgttcgacctacgccgcgcatccaaagggctcctgtcgcccactccaaccagcccagccttccccgtctcaccgttgcaagcccggcatcgctctctaccgcagccgtggaccaccgtcaagcacctgacgccaacaggctcgccgctgaactcgcctctgccccgcctgtcactaagtgatgaccccgaccccttctcgcggtcatccatcggtgccgcaccggtcctcaagcacagcacctcttacgatcccgagctttcggcccctcgaccatcgcctcgctacctcgacttccctgctggcgtccgccggagccatcaggcagggtccattcgggcctccgacccaggagatctgctttatctcactcaaatccaagaggagctgcggccgccgatgaaccactcacggtggtcaaccgactcgtccgtccttcggccaagcgcgcacggcccgtcgtcgttctggtcacgcagaggccgagccgcccttcccaccgagcgcgctcaggcggtccctacgtcagtgggtgtcaacagctttggaacctctggtgggttatcgctcgaacgcaccgacagcccaagcgcggcatcatcgactctctcgcggctgggctcgctcgtcagcaagaaggcgttgacggccgaggcactcattgaccccggcccgactagcgatgctgctcgcactccttctctgaccacctcgcgctcaggccgcaccggcaaggagagaaagcgcccatcgagactcaactttgcagacgtttcgcactctctacgcggctcgtcgtcggcctcgcctctcgtctctgcgctgtctgctcaccagcaaggcgggtcggtcgacaaggcttcaatctctcgacccacgcacatcgagggcctgtcgccttggagcacgcattacgccagggtcgaccagaccaccagcggtgtcggctcagccgctcgactgccggtctcaactccgagcaacccacagtggctttgacaacgggttgctcctcccttcccccttcgcggtgcactctttcttccgactccttggacaagacaaacaacattggtcacgctggcgatatacaaacagtctcttggccgtccctcgctctctgcgatatgcgataaatcagcctcggccgacctcagccgcgatcgactcgaggacctcgatgatgacgcgtatgctcgaaagcaggttgtggccctcgcccttcttgacgatgagcgtgcagtcgaccagctcgcgctcgagccatcggacaccttgtagacggaaaggtgaaggtcagtcgtcggcgcgcgattgcgttgaagaggcgaaaaggggcagggcacgcactcttctcgttgatcttctcatctcggtcgccgtaccagaccttaaccggcaggtcgacgtccgtgtatgcaaagccccactcgctgctcttgcgcatgatggccagcaggtcggccgtgccgcctcggttctcggcatggcaggcccgaaggagcgcggtcccaaagtcagcgcgaggcggcttgccgtttgttgcctcgcacgcgggagagctcgtccgacccgggatgggatattcggtcgtctctccgtcaaggggagagggggaagagcggccgtggatgcccatgtacgccagagcctcctcgggcactccatctgtgtccggaagcgagccgctcgaggtcggcgacgatgacgaggcggtgctgtgcgagaccgagtctcgagctgcgaccttgactggtggcggaccggccttggaaatggtcgggctgggcgacactggcttgccgagcatccagccctgcatcttccactcggccgcctgggccgtcttgatgacgccggccgggacatagcgcagccacttgtagcctgcggcggacgatgattcggaaggtcagcctttcgtcagggaacgcaagctcagcctagaaagggacgcacctccgtcgacctcgaggccgacccaaggtgcaagcaggttgacgctcccaaagacgcgctggccgagccggagacacgcggccatcgcgaacggagagccggctgagtgcgcgaggatactgaagcagtcgagaccgagctggtcggcaacctcttcgacaacgccggcccaaggtaggaagccgcgcttgtcctcgggcacgtcatccgacttgccgaggccaaagcggtcgatgcagatcagacgaagccccatcgactgagccaggtcgtcgtagagcgccgtcaggtagcgcacgccgccgagaccgagaaagacgacgaccggatgaccgtcgggcgcaccaacgtccgaaagcgagatgatgtgatgcttgtaaggcgcgcgagcgagcgtaaccagccgcgtgagcttcggcaagtcgatcgcagtcgtgtgatcaaggctagcgtctcgggctggctgaaatttttgccccttgtatgcggccgatgcgctcgaagacctgcgcgagagcgagacgtctgcctgctggactgtggaggtggaggaggccgtcaagatggaggagatcgatgatttatgctcgggggctgaagccggtgcgaagggtccgaagtctgcctgcgagtccaacgagggacggctgccgttgtgctgagaaggtgagtgagcgtcgtgctgtagaggaagcggagggagattgagacggtcagcgagaaatcgtaatcgcggtccgcggcgaaggagagagactgacctgcccgtcttgcttgtgatccccgtgccaaccccaagagagcggcttcccgtcgcgcatatagaccattcggctggcctcctcggtcccactgtcgagctctccgacgctgctctcgctctcggttcgctccatcgcgccgctgcccgctgctgggaagcgtgcggtcgtcggcgagggtgcaaaggccgagcgttgaggacgtgggttaggagcgtgcaggaggacctcctggtcgaggccagtcctgatgatttcgtcgatcgtccggatgttgagctgttcgcgctttgacaggggcggcggcaccttgtcgcgcgaacgggtggagacgtcgctcgtggttgatagtcggtgctgctgcctcggcccggaggctgatgccgaggctgtagagtttgaccgagagggcgatggccggctccggccatcgaaggacgcaggcggaggctgtgccgaccgagagggcggcttctgcgacctgctgcgaccgctgggagcttcgcgatggccaccagagccagaccgcgacccggccgctttctcgcgacgatggcgctcttctcgctcgacctcctcctttgacttgggcggcttctcgcccttgagcaggcccggcagcgcctttgtcacctcgagctccttgaggagcgtccgctgccgctcgcgcacgaagtcctgctgctgctgcagccgattcttctcgcgctcatgggcctcaaggaagatgcgccgctcgacagcgttcgtcgacgcggcgacctcggtgatctctggcgggccttggccctcgccgcgtagcggggcgtaatcggaccggggagccgctcgctgagcagccgatgcgctattagacgatgatttctgcggccgcctggtgtccaaagtcgacgtcgttctggagggcgacgtcgcagacgcagaacgactaggtcccactggcctgctgctgttactgctgttgctgttgccattcgcgatcactcgaagcttcgccgctgccgccgcgctcgggtcggcaaaggtgacgttgctcctcggtgacgatgttccagtcaagtgcgagtcgaccgagccgagcgtgtcggaacgcgacttcctgacaggcgagggacctgggtcgggcctgccgccgttggacttcgtcgagcgctgctgagacgaagatggccggcctgacgacgactcgacaggcgcagagcggtctgaccgctggccagcgacatcccgcgaggatgaggatgagcgtacggccgagggccttgaagccgaggatcccgacggccgaccggcatccttcgaggaggacgagcgcgaggtgagcttcggggccgagacgtcggctgccgtcgctgctgcggcctgggccggaagcaggtcgtcgacaccgcccatccggaccttactcatacggcggcctggcccggccggttgagcatcgtagctgctggtgttggcttgggcgacactgccgctcgagggcatcgtcgcagcgagcggggcgtaggcctggaagtagctcaaggccggcgtgatccgaacaggccgaggaggtggaagcaggtagggagtgtcgctctcgtcggacgagtatcccgttgagtagctcgaggtgccttggccagaggattgcgaagcgtatgagggatctggcggagctgatggtccgggaagagagagggaggaggtgctggtcggccgtcgggaggcgtacatctcgtcctaagagctccggtctcgccctggcgcgatggcggggccggctgctgggtcttaagttcgacccactgagctgagtcgcgaccggatgggggctgatgctggccgcctccaaatcaaggtcgggagagggcgacttcggtctgcgacatcgggtcgcagcagagtcggcaaggggaggggggaaggtgatcagtccgcgtccttcgcctctgcaggacaggagctagaagcgcacctactagcgatccaggcgagcacgagcgatgccagctgggacaggctgccttggctgctgttgatggtctcctgtcgtcgtcgtcgtcggacgcaaggtatttgagtttcagccccgggctggcgcgagtcgaggcccggttgaacgcctcgtccatctgcgacatcgagaggccttccaagctgccacgctgcccagtgcaggtctgtcagaagagcttcgggctgtctacctgcctggctaagatagctcgaaggacgactgcctgacggttgctgtttccgcatcgccggcctggtgtccggcggcgtccgccaaccgtcgactatcgcctgcgtgctttcttgggtggctgtgcctctgcagctctggaaacaagacgtcctctaactgcatgctggcactgactgcttgtacttcgagtcctgcatgaattgagcgagttggtgaggagggcacgcacaggccggaagggcaaataacgctcgcgcagcacgccctcagccctcggatccgacgacgtgcgtgctcaagcgaccacgagtctcttcgcaaaggcgacatgacattacaacgctagagaacccgggagatctaaaagagaagatggaaagacggggatcaagcctcgagagcggcgaggatgcccttgagaagaacgcccacgccatgagcacctgggtccggaacttgggcggctcgcagatcttgtacgttcacgtaggccgcccgtcctgccttggcctcataagtcgctgttgcagccgccgcatcgaccgccgccttgaccgcgcctgcaaagtcggctggcttggcggcgaacgtcgtgatgaaagcctcgagcggatcgaccatcgtccgtgagggtgcgcgcgctgtcggccgtacgtaaatcagcaagagcgacacaggagagacgagaagttgacaaacgcacctcgcgtgtaggtgtagagtgttgcctttgcagagaccagcgcttcggcccagacgtcggccgtcgcgacatcggtgcccttttcctcggccgcctttcgcaggcccgacgcaaggccgttgaaggcaatcgagtagagcgcgcccgacgtaccatccatgtcgatctcgatctgctcggccagcgtcaggacggccgagatgacatccgagtcggagacgcggccgtcggcgatcgcccggaggatgcccttgccgccggcctcgaggcagagcccacagtcgccgtcgccggcgatcgtgtcgaagcgggtgagctcgggctcggccgcaatgacatccttgcaggcctgctcgatggcgccgatgaacaggccagcggaggcaggggcgagcggcttgccgatgttctcgaccgtgtgagcgacgtcgtgggcagcactctcggtgccgttcgactttgcctcgtccgacggcgtctcccactctccagggccggccttgctgtgccatgcccagccgggggcgtccgccggagcatcgacgagctcgatcagctcggccgcagagtaagccgcgtcctcgtccgcgaccggcaggcggaggagcgtgatcgagaagccgggcatgttgagcgaggtctgagggagcggtcaagagtcagcaagggcgtcgcaaatatggcaatcccgctcatagacgcacgacataggtgccgactagcagtcgtcggaccttcaagcccttggccttgcatgccctgaacaggaggagacgcgcgccagtcaattaacgaccggagctgggcgaagctgatgagagcaaaacgcactccatggcggccgaggcgatgccccccatctcgagctcgctcgtcccgccgaggttgttaaccatgaggacgacctcgtccgatccatcatgcctgaacgggacaaaggaccggtccttgtcctttgtgtcgctcgcaaagtcgaccatctgcgcgaggagctcgcgggcagtcgggatcttgatccgcttgacgccgggctcgttgtgaatgcccatgccgagctccatctcgtccgacttgagcgtatgttctgaagcaccggtaccggggatctgcacgaatggcaggcgttggcgggtcaggagacgatcgctgcgtgttcagaaccgtggcaccgactcacatggcaatgatcaagcccgacgccaagcgtcgccgtcgaatcgacgacgaaccgggcgagcttgtagacgtcgtcgaccgacttgcccttgtcggcgagcgctcctgcgagcttgtagacgaggaccgcgccggccagaccgcgccggcccaccatcgagccctgcgatcggccgaccgagacgtcctcgccgacaaacagaattcggaccttcgacgccgggttcgcggccgaatactgctcctttgcgagaccaaagtggaggacgtcgcccgtgtattgagggatgaccatcaggatgccgaggtcattgtcgatcagctcaaggcccttcttgatctggttggtattgggcgctgaaaggagaaagaagtgcgcgcagcagcagtcagcctcgccggtcattcttggccatcgcagacgaccgatgaaacacggacaggcaaagacgttgccgctgacggcagcgctcagcagaccaggaccaaccatggcagcgtgtgagggcctaggaggggaacgcgagcgaagacgaagctgtcagccctcgccacatgctgacagacgggctttaagagcagccgctactcactcgtggccggcacctccgcccgagaggatcgtcacccggtcgcgcggaacctgcttgcgtgagatgactggcagtgcgccagagatggagggatgtcagcctttggagccggagcagctcgccagccgcagctcgcgtacccttgtactgcgcgttgagcgcaaggttgccattcttggcgacgaggcccttgagggcgtcgaggaccatgccggtctcgttcgtgacatgcttcgtcgtcattgccgctataatgtcgggtaaggccggaggggaggtgtggttgctactgccggtcgcgtgaggccgtgtagggtggcaggaacggaggcgggcgaggcgaggaggaggagggaatgcctcgcccgatgcaagacgagcgagacgcgcctttgtagacgacccgcctcgcccatcccgctctcggccggttgccgcttgtccggcaggtggtcgagcaaggagaagccgacgagtcggctagtcaggggacattcggctggccggcccgggtccgaccggtcggaggtcgatcaaggctgcattaggtaatcatgataacagagtcggtctcttgaatctgggtcaagagcaccgcgaccggcgctatccgcgtctcctgacggccaccccgccgccgtttgggatagagccggagacgggacccctatacgcacggcccaatctccccgtcccgcctagatggcctgctcttaaagacgacccactcgggcccgcctcgtgctctctctctctgaacctctctctcctccctctagcacctccttcgtcagccaccaccatctgcccgtcatgcccttccctgccggccttgagtccaaccggacgctcaacattctcaaagcggccgaagagggcagctacggcgtcgtcgccatgacctggtgcgcttcgtaaagcgctgctagcatctccaacgtctcgtgctgattggttcgatctcgcgctcgcctggcagctacgacgcgacggccgccatcggtctcgtccgggctgccgagaagtcgcgatcgccggcaatcctccagctcttcccggtgacgatgcgtgagtctggtaacgccgagctggtcaggctcagcacctggctgatgtctcctcccccgtccagactacggcggcatctacttcctccgcttcgtcctcgagctcgcccatgccgcctcggtcccgatctccgtccacctcgaccacgcgacgaccgacgaggacattgacacggccctccgcttcgccgaggccggcgtcgcctttgactcaatcatggtacgtcgcgagctggcgctagtcgaacttctctccgacggccaagctgaacatctcgttacgaccgcgctcgacaggtcgacgccagccacgccgacacggacgaggagaacctttcgattgtgcgtcctcattctaagtttctgcccgtgtggcccccactgactaggcctctctctcctctccagtccaaggcgcacattacgcgcgcgacagcctgcggcgtcgccgtcgaggtcgagctcggccgactcgagggcggcgaggccggcctccgagtcatcaccgacgctcagctgacgaacccggacaaggctgagcactttatgaccgagtcgggcgcgacgctgctcgcgccgtcgatcggcaaccttcacggaaagtacctctcgccgcccgagaaccagttcaagctcggcctgtgcgccctcccttcgctcctttggcctcgtgaagccgtcactgagtgctgaccgccgtctgtcacctgcgtcccatgctgcagcctcaagacgctacacggcatcgtgcagcgaagcgggcactttatcgcgctccacgggacggacgagctccccgaccaactttggcgtgactgcgttaaggccggcgcccgcaagttcaacatcaacagctgggctcgggttcgtcggcttgggcttttcttgcttctcggggtctgggactgaccagtgcccgctcccacaggacccgacgatgaagcacattgagcgctcgctcgtggccgacgttccactcccgcagatctacgaggaggcctcggacgtctttgccggcgtctgtgagcgcttctttacgctactcggctcggaaggcaaggcggcctgagcacgcgaccgcttatttatgacagtgacgactttcaaagcgagcggacgagtgtacaagggcctcaaaggggcccggcatgggcatcgagcatgggtgagcctcacaggcagaaacgagagatcgtctcagtcctcctcttcctcgacgggctcgtagtcggtcccgctccgtgaccgccgcttcttccaaagccaccagccgccgaggccgatcagtgtgaggacggccgcgccgctgacgatggagccaacgaggatccagccgtagagctgagcccacgacggctcaaacgggacgagaacggcactgcggcgacaagggttaggggaggcgggatcagtgacgagcgcagagtggatgatttagcgagagaaagaacgcactcgaggaggaaaacgccgccaccttccgtcacgccattgatgagtggctggcgcttccggtcggactcctcactcagcacagcgttcgttcgctcgccggcgctcggggtcgcacggccgctcgcaccgacgtcggcccagtcgttcagctcgatcccgcgcgcgcccttgatgccgacaacgaaagcgtcgcgcgtctgacggaaggcgaggtcgccaaagcgcgaggtggccgacagcagcgtctggtacgccacatcctcttcgatcgcgagcggccggctaggcgcgcccttatcgggcggcgcgaaccgagcaacgacggaccggctggcgacctttgggtcgagcggaatcggcgcccttgacggcaggatgtggagcttgagtaggtcgagcagcgtcgcgggcgaggttgcattgcggaggagggcggtgatgttaatcgctgcgaatgcctcatccgtcggcgcgagaagagtgaaagaggtggcgagagactcagcctggaggtcggacgcggcgctctcccagccagcctggattgcgagaggagaagacagcaggtcagcttcacggcaaggtacaaccgagagcgggggagggggacgaacgatgccgagcgcggtaatctcatctcttgttggctggcggccggcgaggatccagtcgaggcccgcccgctcgagcaggtccaccatgacgctcgccttcgcaccacggagtaggttgccgaccgtgacgttgacggacacggggatgatcacctggtcgatgacgtgaagtgcgctgcaccgggttgcgttctagcagggtcagcgctcaggggacaaaccaaagctgaaggacaacaacgcgcgacgcacccgtttgccgtgatggcatcaccgcgcaggatgcgggcccgctgctgctcaccactctgccggccgctgctggccttgccgactttgacggtcccgttgctgccggcctcaaaggctagcgaaccgccgccgagcgtcgggtacgacctgcgcttgcctggtccgcccgccctcagatcctcgaggtagacgatctcgtcgacaacgtggtgccgcaagacggctcgcagcttgatacgggcttcaggcaggaggaggtagtcgcggccgaggccgagccgcgtccaggcccggttgtcgggcgcgagaagggtgatggcgccggccgcacgaagacggtcgtcgagccgagccgcgaaggccgcggcgaggaaggtcgtcaggtcgagtgaggtgacggccgtttcaacgaagtcggccggcgggtcaaggaaggaacggacgcggtagatgatggaccggccgacctcgacgggctcgccgacgacctggacgccggcgaagcggacctcggcccagtcatcgccgtcgccgttgtcgtccccaccgagagggatggcgtcagcggccagccggccgaggaccgatctccgcacctcgacagacacgacctggcggcctttcttgagtaacggcgtccgaagctcagaagggagcaagccgccgtcgcggagctccgaaggccgaactcggccagggaggatgtgataggcgagacagttgcggagcgcgaccttccggctcggaggcaggaggactccgccttcaccaaagaccaacgctgaggtctcgtcgagcggggcgaggatggtgtaagcctcgccttcgtgcgcggccgagccgttaacatagccggcgaggccagactcgcgcaggagcgagacaaaacgggtcgcgttgaggccaatgaggatcttctcgggcgtaagcgtgaagggcgggacaagcagcgagtcgatgatgtgaacgacgcctggtgggagggagggagcgtcgagtcaacgacccgctcgtccgagatgctctgagccagtcgacgccgcaccattcgaagcaagaatgtctgcttcagccactggcgtgccgtccttctttcgccgcttgcccccgccgtcctccatgccaacagacatcgcaccctcggcgtcgaccgtcacccagaccgtgccgccaccaactacgtcgacggcgcccttgccactcctcgcaaagcgctcgcgccaagcgacgtctccggttcggctcgcatggaagccaacgagtcgctcgacgtcgtccctcgcgaagccgctctcaaggtaggtccgctcgacctgaggcagagccgcaaaggcggcgtttgagggggcgaacagcgagagatgcggcagcgtcgacagcagtgcgaggtaagatgagggcggcaccggcgacggtggcggtagaccggccggcgaaaggagggccgacaggtatgcaaggtctgggtgagcaatgatcgtcgagcctgtagacgcacgcagggcgcgtgtcagcggaaacgcaaggcggtgcaagattaagctggacagatgagtgcgcaccgatgttctcaggaagctctagtacgccgtcgaccttgatcacgacgccgttgcctgcgacgatgggtggtgaggcgatccggacgccgcctttgccccggccgtcgacgccgagccagtcgtcgctctcctcctcgccttcgagctcgccttgcatcgagctgtctcgcttccgccgaacgccatgcactcgttggcccttgaacccgagctggccgtgcggcgctggcagccatggtccgggcttctccggccggccatcgctaccaggcttccgggggaagagcagcgtctcgagcgactcgggcaagccgccgagcgacgggaagcgcggccgacagggcacctcctctggtggcggtggagaggtacgcggttgtggcttgaacgagttgttactcggtggccggttggcctcgattgggtcgagcggcaggctaaagttgagaacgtggtagagaaggcggtcgcgtgtcgctcggaggaggttgtcctgctcgagcgagctgtcggtcgaccaggcccagtctgcgagtgagccctcatccggcccaccaggatgaccggccgcctcgaaggcggcattggtaggggagaagagggtgccgttggcgagggcgttgagtgccggcacgagctgcgtccgctgcaggagccggaggagcgtcgagtagtccgggtcggccgagaggacgtcgacgagcgtgctcgtcgtcgtccctatcggcggcgggtcctgttccggcggtgtggacgaaagcaagggctgctgctgctgctgccggctgagagctgctggtggagggtcggcagaggctgcggcgacagccgagccggccgggagggaggcgagcgaggcgaccgctgccgcgagcagtccgttcaggcgcatgacctcctgaaggcggactggtccttgaggtggataggcggtcggtgctactgaggagaaggcaagagctggcgagacgacgtcgacgtctgtgggttgtgctggctcgcaagcgaggcggccgggctcgcgctcgcgttcggaacgcgcgctgcggcagcccgatgacgagagccgttcgtacggtctgaggtgcactcatcgacgggacaggtcgtctcccgccaactacgaggcattctacagtctatacgcatctatcggtcccgctctagtcggccgccggggcctccttgccctcgatgtggctgcttcagagtcactggtcagtcggccgtccgcaacagagcgcaaggagttcggacgtactcgaggatcgccttcgagtagcgctggcactgcttgtagcacgcatcaaagccatctgcgccgccgtagtaaggatcctgaacgttgatctgcttgccggtgaaatgcgagaagaggaatactgttcaaggggccgcgctcagggtcagcgagcgaggactaaccagcagcgagaaaacccgaccttgagcctttgatcccttacgctgctgccgctctagattgctgaggttgttcttgtcctgcgaatgtcgacgggagaggagcgtggccgtcagttcggcccagttgccaatcatcgtcgcttgagaagccctcgaacggtcgcttcgagtccgccacagactgaccatagcaaagacatagtcgaactcggcatagtcggttggtcggacctggcgtgcccggcaggaccaagggacgccgtggcggtcgaggacgtcaatcgtcctggtgaaccgtcgtacagcaggggtcaaagccgggtcagcgccctccatggcgtcgtccatctcaatcggccgaaccactgaccgctcatcaggcttgtccccagcgtggtaggcacccgtgcctgtagaccggcagacgagcggatagcaagaggtcagcgagggtcagccctcgacgtcgcgcgcagctcgagcagcgactcgcagacgcacctgccgagtcgaccttgacgtcgagcccgcgcttctcggcctcagccgcaaagacagcctcggccatggctgttccgagatgagggaaggagccggcgttgcaggtcagccactggtcgtctatcgaaagtcgatgatgcagtcagccctcgcggacgcaggagtagaacgacggacgagagcggcagatattactacaggaccgctcgagagggtcagcgacagcagccaactaatgagaggcacctgcagactgcttacccgaggcagacgaagaggaaggaaagctgaggcatgatttcggagggtcaacgtcgagggctgagcaggagaaggtgagcgccttcgctctcgacgaccacgaccacgacagcagcagggccctcttccagccctctttgccccttttagcgcccgtcgtcggtccatctcttggcaggccgtcggcttcggcccttcagatctcggacgctacgatccgcgcgactggtcgagcgtcggcgacagacgctccgccggcacccgcctcggctcgcatcctcggtcggaggtccgtgcttgtctctcaatcagcttgcttggcccaagagctgaccgaagatccttgttcaagatgttggcctctctggtcactcggccgatgctcgcggccctcgctttcagaatggccgtcgcacccaggtggccattgagagcgcgagcggccaggccctacacctcggtcccaccgaaggaaggagcggcagaagaggctcaagcctcgcaatcagcttcgccgcatcacgacacgatcagcccggcagccgtgagccgtcttgcgctcatcatggcggcggcggcggtgcggcagccgaccgagaccgcagccgccggaaccgggcttagcgacggcgcaagcgtccgaaacgcccgacgggacgaggcaagcctcttccggtcgtcgaggttcactcgaacgaacgacgagcgaccgatcgagggcggcagtccatcagccgtgtcagacgtcgatccggatccgagcgccttggacaagagctcgctcgaggactccagctcggagggctgggccgacagcgtgatcgctgactcgtacaacgcgatgcgctcggccgtgcacctctcgaccggtctccggcctccagtccctccgagcaccgcgtcaaacggcctacccgctctctcgaagccgcccagaccgctcacgcccgtcgccgcgacccggctggcggctcgactgagcctcgacggcggccaggtcgacctggaggagctcgacggcctctccccggatctcgcgtcccacagttggggaaggaacacggcgaaagtgaatccgagcaagaaagtgagagcagcgagggcgaaggcaagaagagccgcggaggcagcgggccagccgacacccccgccctgagtcgcccccagcttcaggcccgaccggccgaccctcgacatcccgcgccttgtaccgctcgactgatgcctcggccatgttggcaaggagagcaggtcgctccaaagtgacgagcagcacacgcgcgccagtcggtctccacgactgctcgcaaagtcggccgcggtccaacgccctcgacgacggctggcgttcgaccgagtcgcgaatcaggcaatcgttcgcctttacccgcggccggccaagcaagcacacttcgttgccgtcgaggtcggcccgacccagcctcgtgcttgcgggcgtccttgctcggcgtgcgcctcagccgccttagtccatcggcgctcacgactcgctctcgggccagtcctcacatcggtgtcgtcgtacgagcgaccgcccagggatgttcaccgacgcagctcgagctggcgcggcggcgcgacgtgactgcaatcggtcgagccgttggaaagccgaaagcggcgtgcgtcgtgcctcgcggccggcggcccgacgtcgttctcttccggcaggcggccattcacaacgaccgaggccagcaggtatccggctcaagtgctgcgggacgggacatccggccgcttgccggcggacgactctctccatggcattcctcttttgccccggcgtgcagcgccgcagtcctttctcgctctgcttcagcaaacctttacctgcgacgggcgacaagcaagcggcagcggcagcgcgaccacgttgcggggacgccgacatcgtgctcgccctgtgctgatcctttttcaaccatttatagagcgcgagaagcaagcgcaaaagcaagaccggtcggcagggtcgtcatggattttctcgtcgtcggtcggccgtcgcgcagtcgtccgaggagggcggagacagagctgcgggcgaaagaggcgtcgggtcagaagaggcgacgagggttgcgaaggtgccgacgggtcaggcctgtcgctctagtagtaacgtccaggtcctcggctccgctgctcgctgtgctctccctctcgtcgacagtctctctactcgcgagcaaggggtgctttgcggatcgtccctcatcatcttatttggcttgttcgaggcgatcgaggctctctcgtcttggccgccgcgcggcgttggcgaaagaccatcagcagctctgcggcccccgcacggacgacgaacggccatcctcccctcctcttcctcctcgaaaagctctctcaagcagacacagcatgagctccgatctctactcggcccagggcgtcgagcccttcctcgaggtccgtccgcttcgagcgttcaccgaaagccggaggcaaggcctcgcggcagatggttcgcggcgcaggagagagactcttgccgtcctcacgccgtcaatcaacaacgggacgagcgtcgtcgtcgccgtcgtcgtcgacctcgtcgtctccaaaggcgacctgatgccaaggcttaggattgcccagtagatgtcgtcctgatcgacaggcgagccggcaggcttgggacggggagaggccgagaggcggtgggcgcctcgactcgaccggtctcgctccgtcggcgggtcatggtggctgggcaagcagcatcgagaccgactgactgcaggaacgaaggacactgacgccctaccttccatctctctcgcgcatccgagcagtatcagagcgcgtcgcctcccgtctcgcccgagcatacgaccgccggccgggacggctactttccggcggcccagcaggccgagacgtcggtcgcctgtgcgtcttgccggcctcctcctccccgtctcctctgccgtcactcgagctctaagctcgactcgacatcagcagctcgtcctagatgccttgtcgtccgaagaggacatctctcttagacgcgtagctgactctcttcctcttctttccgctcatcggtcacccgctcccgtcctgcgcgccttggctgtgatcccttcgccgcaactccagggtcccggaggaagagcgtgtcgtcaaagtcaccgtcggccgagtacccaccccggccaatcttcacgccctcgtccgagcagcagccgggcgggtcgtcaccgacgacgacgagcccaccggcctcgccctcggctgcgagcgcgacctctggcggagggggaggaggcgtttcgggtctcctccggaggaagtcctcgaaggtctcgacgaacggtagcgttagtgggtcaggcggcgcagggctcggtcagggcgtcgcgaggcggccgtcggcctcggcgctcgcgcgaaagagctcgcagcagtcgcgcttgaccgcctcgtcgccgtcggttcagccgctcgccctcccgccctcaccgacggccgtccggagcacgatcggcaaggcccagccgtcgtcgccgccggcccttccctcgatcaacaccaacttcccgccggccggctcacctcctcgcgggccgaacgcaaccttgccgacgacaacgaccgatcaacttccgctccctcctcctctgacggcaggcacaacccacaggctctcgacgcagcacgaacagccgacgccgccgctcacgcccgacctgatctcgcacgcccttttccagccgccgctcgcagtcgtcgccaaccggcctgcaccctacgcggccgtcgctggcccgcctgcgtcgcccgtcgcgctcggcaggggcacaagctcgcgtaggacgagcgagacgagcagcggtcgggtcgacgatagcttgacgacgacggcgagctcgggctcatcgactgtttcagcctttggcgagccggcggtagggaataaggctaaggcgcctgctgcggccgacctttcgaacccgtgcgcctaccatctcctcggctggtatgaacgtctcgctttccatggctgacacgcggcttcatgctcttccaggtggcgctcgcagaccgagcggccgctcgacacggtccgccgattgagccggcttgttgacggccgagacatgagttaccaggccaaccggcactcgagctacggcctggccgctaccttgtcgtcgccgacctcgggccggtctgacgacccgtatgccgagttcgtcgctgcccgtctccgttcctgaatcctgccgtgtccggcgagcctgaccacgcgccctccccgactgctcgcagctcgtcttcgtcttcgtcgatcacgccgagctcaacgccgctgtcgccctggggcggtctgccctcgtcaatgagcatgtcgggcccatacccgacatcagcccccatggtcggagccgtgcgtcctacgctactcagcctagacgcgcttgaagactgacgaatgtccccccttcgtcaaccgcagtaccccctgccaaaccggacggtcgtcacgccctttgcgctcgacgcgagtccctggcccgtgtggcagtcgaccgaagggaccggcatctcgtcggatggcggccggtcgagccggaacgggaccgtcaagcgcaagggtacggtcggcggggcgaagcagcgtcggcagtcggacgtcggcccggccagtaaacccggcggcgggcctgctggcggcctggccgcgctccaggtcgcgccgacttactcgcgctcgcccctctcgcaagcgtcctcgcccgaaccttcaccgccttttatcccctcgtcgtcctctgcgccgccctcgatcgccgaaggcaggccgtcgacgctcggccggacaaagtcggccaagcgccggctgtcgttctggcggagcaagagcaaggacggcgaggacgagcgggcagacgttgtcccgcccttgccggctagtccggccgggattcggctcggcaagggcgggggcagggaccgcgtcgtctcgaccccgcctcagcagcagcagccaagcaagaaggagcaggctgcgacggcagcgagcgaggcacggtcccgccgagccgcatcagaaccgctcgccgcgtcgaccccttcgtcgacaccttcgccagcggcccccgatcagcgtccaggctcgtccgcctcggtgagccggtcgtcgccacttgccgctaagacaacggcgccacctccgtctgacgcgaaggttagccgcggcggcatcaccggcggcggtggcgggggcggctttggcagcttcctccggcgctttgccacgctcggccgcaagggcccggcatcgacgtcggaaaagactaggtcggccggcgggcccctccacccttgccccgcggccggaccggccggacagctcgcgcccgaagcctggctcgccaaacttctcctcggcgcgatcgtccgcccctcttcctcttctccatctcacctgcccttggacgccactgctcaccccctccctcgttcgcctgatctccaggactcatcgtacgactcgaaggacgagcgccggcgctgaaagcgggccttgccggcctgacgagccttcgaaaggtcgcgtgctctgacggccccggctttgacgggtctttttcccttcgccaatcttctccccttcctcatttcttctctttctgcctcgtaagagggctgtccacttcgcacgccagacaagcatgccaagtcagatacaggtcgttcaatcgtcaaatgagagagagagagagagtgagaaagagagagagagagagagatcatcaaagctcttagtcaacgaggcgcgcgagttaagagaagggggttcaaagtcggccgcgcacgctcgccgctcgcccgccccacggcctaagcccgccggacaggcggcatcgcccgaatcacgctcggcctcttctgctgcgtctgcgccgggccggcagcggcctgcgagcccgcccctcctcctcctcctgcgctcgcattcttcttgcgcggcggcgcgcgcccagcggcggtgcttgtgctcgggatcggtcccgcccatgcgcctgcgcgcgagaggtttgcgcgggggaagtgggccgaggacgaggttgaagccgaggcggtcgacgttgcgcgggaggggggcgagtaggcgtactgctggaggttgatcgatccaagctcggagggcttgctgagggttattaagaagattggcagaggtccaggcggtcagcccaagaggcttgaatgatatccgttgagaagtcggacgcatggacgcaccggacggcaggcttcggcgcggccgcaaccctgttcgcagtgaccggcggcgtcagcggcgccgcgctgcccgaccttgagcccggcggcccggtaaactcgagcaggcgcttgagaaacagctggcccgtccgcttgaacgtcgcctcgtccatctcggtcgccgcctggaagccctccttgtctgtgtatgtgtgtgcgcgagggggacgagtcgtcagtcgcgaggacggctgtggcaaggggaggtgggacgtaccggaaggagcgaggaggacgagcgcctcgagcgacgtgtcgtcaatgatcgtctcggggtcggcgacatcgcggaggtcggccatctgcaggagatgggaggtcagcattcgtggtctgcggtgcagacagcgtctcgagaggaccgacctcggcccggtacttgcgcagagcctgcagcttggctttcgggttgaccggcgccgcgtcccccggcgcggcggcaacagacttggcccggtgcaaagggggcgcggccggcggcggcggcatctcctcgactgagcggacgctgccgaccgacgtccgtgcctggcgcgtcggcgccgcctgaacgacctcggcgaggtcgacctcgctaatgtcgagatcgccgccgaaataaaaatcgtcctcccagggctcgtcggccgcaaagacgcaatttgaatcagcgaggttccggccgcccttgggcgccttgggcttaggcttggccgcggctttcgaggcggcactggctttgcccttccgtggcgtgctctgccggaaggtgagctgggggcgaggcccgccacagaaggacgtcaacttcaggagggcgacgtctcgatgcagatcggaaattgagtgctaaccgtgacattcttgccctgctggagaaactcttgggccttgcgtccgggctgcagagcgaaggcggggagaatcagtctcgaccgtcacctcagcccgatcgcgcgacgcaccttaatgtaggcgttggagaagccgcctccgttggcgacatattcctcctcgaacgcttggtcgatcagcaggagctcaaagaggcgctcggcgtcgccgaggtcatagtccttgccagagcctcggccgctgatggccaacatgtcaagctcctgcgagagcttgacactcgtcccgcggaagaggccgaccgcctgcttcatcgtgacgcggccgcgctggagggcaatatccttaaccatgcggatcgcggcctgggcagcctcggtctcacgttgcgggaggagagggcggcggcggcgagtcagcttgccttgcacagggcgaagaagcaagaagctagggcgacgcacgacgcttcggatgtcgataataccgtcgccgacggcgacacagacgtcgcacgactggtggcagtcctttgagtcaaagtcctcaccaaagaaggcctaaggagggagctgcatcagtaatcgctgcgagagaggacccggttgcgagacggggggcggaacgcacaaggacctgccgccggcggcaatccgtcttattcgtgcagtagcgcaggacgccgcgaacgttttcgcgctgccggtcggcctgcgcgtgcgttaggttgcggtcgcggaggatgttgctaaagatcgacttggtatcgccccacgagtagtagaggacgcagatcgacggcttgccgtcccggccggcgcgtcccgtctcctggtagtaaccctctagcgagcggggcaacgcgtggtggatgacgtagcggactagaggcgaagagcagtcagttgatgccccggctgggcgttgatcaagcgactgaccgtcggccttgtcgatgcccatgccgaatgcaatctgtatcgagagcgagcgagcggcgtgagcgtcggcgcgcagcaacggttatagggccagcgcaccggcagcactcacggtcgcgacgatgaccttgatctcgcccgactgccaggcagcctgcgtccaggcgcggtcgtcttttgtcatgccggcgtgatagtgcgaggcgttgacgtggtgcttgtcgcggaggtcctttgcaatcttctcgcagccgtcacggcttgaggcatagatgatgccgcagtcggtcgggtagtcggcctggataaaggcagcaatctcctcggtcacctttttcgactttggccggatctcgtaaaagaggttagtccggttgaacgaggacgagattgtcacgcagttctgcatccgcagcagccggacaatgtcgtcccggacctggtggttagccgttgccgtcagcgccatgaccggcgtgcccgggtaatcgtccttgatattggccaggtcgcggtagtcgggccggaactgcaggggcggacgagcaagggggcagctcgtcagcgtgatgcaggagccggtcttggtaggaacgacttgcatcgtggccccactgtcgagcggcgaggaagagcgaaagggcatcttggtcagcgtcggcagacagacggcagcgaaaggacgacgcaccgagctcaggcactgcgagacaaggcgacacgaaaacagcaaggggtcagctcacttcggcatcgatgcgggctcagcagagaacgagacggacgtggcactcgtcaatgacgaagcgagcgagcttgcccttgcggtgaacgctccgaagcaggctctggaacgtaggcgacttgccgagcatctcgggagtgacatagacgacggcgccgtcgacgatgtcggcgcccgagacgccgccgttgagaaactgcatcgcccgcttcttctcggccgccggcaggtcgcccgtgaacgggatcgcagggatcccgagcgagcgcaggtgctcgacctggtcgttgatgagcgagagcaaaggcgagacgatgatggtgatgcccgacgtcttgccgccgtggacctgggacggcaactggtaacagagcgacttgccgccgccggtcggcatcaggacaaagacgtcgcgcccgctgagcgtgccgttgattgcctcgacctggttcggccggaacgaccgcagcttgaatgtcttggagaggacgctcaggcactcgcgcgaccacggatggttgaagcctcggctggcggcggcgtccgcgacggctgcagcacgggcggccgagcccgacgaatgcgaagggccgacaaccctcgccatcgtcacctcgtcgtacgccggtggcggatctgatggcggagggcgccgccggccctttgtcgagggcgagggatcagcgagcgggacaatgtcgtcgctcatgtcgaggtcaaacgccgaggccggcaggtcggcaaactcgccggccggatcgttgcccgcgccgtacgtgacggtgcctgtcgcccgggccttgcccttaccgccagcaccagagcccgatgccccgcctgtgatctgaatctcgtcgtcgtcgagcgcaaccgggtcgtcgtaggcaaagtactcgccctcgtcaccatccgagtcgccgagctcaatgacggcgctcgacggcttggtcggcgtcggcggtggcgccggccgcttcttgctgctgctcgagggtgccgcccgcgagcggctcaaagtcgagcgtgagggcgtcggcggcagctcgtacgacagctttcgttcgcaaggaaggcccgaacgtcagcattgcgcgcagcagtgtatgcggccttttagcattcggcgcacgtcgtggatctctaccggcttctccttcttgccgactctccgattggagctgtacgggctgatgttctccttgctcgggctccagtcgggcacaagcgtccggtcgacgcgcttggccggcgtcggcgcgcgcggcggggtggcgactgcggacgagagagccgtggtcgtcgagcgggaagggcgtcagccccggctaagcaagccatcaaggcgtcttttgtggtccggcaagcctcacccttcgaccgcttgagaacctcctgacgcgcgctcgggaccggacttggccgcttgcctactcgtgtgctcgccgagaagctcgggccggccgcggcggcggtcgcgctgctcgtccagaggatctcctcgatgctgtcggtcgaggtccgggccttcttggctgctgatggtccgacggacgcagctgtcgaggctaaaagcagggccatcgaaagttgataaggggccagcttgggaggcaaggggaagagcaggtggagaacaggagacgacgcacgcgtgctgccgccgactccattaccggacgtaccggcgttcgagccgaccgccttcttgccgctggtcaagcccgccttgaggaaggtgtcgagactcgtgagacgactgccgctagcattgctgctgctggccgccgtcgagggtgccctcagctccgagacccttggctggccggtggcggaggcgctgctgctgctgctgccggccgctgccgccgtcgaggacgacttgagcctgcggagctggtcctggagattgttgcgcggcgtgaccatcgctgacctttggcgggggcactctgagcgtcgacgggcaaggctggggggctgggcacggtgaggaaggaggaggaggagccggtcaggacgcgaagtcggggggccgcacgacgcgcctcgatgcaactcacaggtcgcttgatgcgtttgagacgggccgttggcgattttcgcccaagggctttcgagctcgccctccctccttctctcccagcgacctcctccgtcaacgcaaagaaccgcacgtagcagcccacgcacacgactgcccgagtctcgacccggcgcgtctccctctcccgctgctggaaaagtccccggaggtttccccttcacccctcaccgacagggcgacctttgacgcggacgccatcccctctggccggccatcccaaagctcgtggttctctcgtcctgccgttcgactcctcttgctcgcaccccgcacggctcggccctcgcatcgtctcgaccggtcgccctcacgcccgtccctgcaccaaaagcggcgatgatccccgcaccctccgagcttcgttcctcaggccgtctttctacgaggaaagcgggcgctcttaagacagcgccttaagtagggcggccggggccttcctctcgggggaggtcttggacgaagctcaacacgggtgcgggctctcgcgtcgcctggggacggaaacggagacgatccggccgcagacggagggtcctgacgtgcgcatcggtcggcaagggatcgacgtgggacatcatgggaggccgcgagtggttggtctgaaggcggcgtcttggccgttggtcgcccgccttatgtcgggggagaaggaggcgctacttggctgtccttgctcttgtcttggtcctggctcggccgcgggggcttcatcgccccttcgctggccgtccgaccggcagacgactccaaagcctctttctctttcccccccccatccttcacacactccgccgctcgtctgcaaacgactcgtaaaagccatccgttcgacccgctctcctttgcccgccggcgccgtcgcagagaccgccgtctgggtgctccccacctgacctcgtgcgctatcccaaacctggcccaacccaatcaacgcgacccgagtgatcctcgccgctgctcgcggccgtcgtccgtcgcctacagagtgaccatcgggcctggcgaagatatgagccggccctttccctcctttgccaaggccagcgcgtacggtcggccggcttggacctttccttgcggtcgcagcctgggtcgggggcgcacgatcggtcaaggggtcctacccgacggccttccttctgcgtacagccggtctgtccctcacaatcttgtgtgtgaagggagggcagggccgaagtgcatcgggtcgtgtcgaccggcattaggcacgagcgcgcaccctcttaccccgttcctcatagccacacagtcctgcggttgctcggtcgtccgtccttctggggcgcgcgtccgggtatctcaatggggcttactcttgcttgacgcgaggacccgtcgctcccttttttccggcgcgcagcgcctggtggtgtccattggacgtcccaagtgctcgctctagagaatcgccctcctggctgctcgcctgcccgcctgcgcagactcctggtcggctccactgtcctttgcgaagacggccttcgggacgacaactgcttttggatcttgggcgttcatctagaagcacagggcggaggaagggcagcggaaggcggcaaggcgcgcccgaccagcccgcgaggaagaaggagaaagtggtcgaaagcctcctatgccgccggccggggctcgcgcggttgcgagaaggcgacgttaaggatgaggttggagaaaccctggccgtcgacccgcgtccgggcgtactctgcgacctcgcggctctcaaacgagacaaacgcatagcccttcttgacgcccgtctcacggtcctttccaatgtagacgcgggcgacgcggttgttgcggaggtgcttgaccgcccgctcgaaaaggtcgcgcaggtcctcctcctcgacctcctcggcaacgttcgtgacgcggagcgtcgggagctcctcgcggccggcaccgcccggtccgccggggtagcgcgagccctcggagggaccacggagggccgcgccgggtccgccgcgcatcgagggcgggacgtacttcgaagggccgccgagacctccaccgcccggcgcaggagcggcaccgccctcggccggctcagccccaaagtcgggcgccgtgtcgtcgccgaggccggcgagcgtctccttgtacgggcacttagaggtgaactgagcgagcggagtgagcgggcagggcgtcagacatggcggcggagagaaaccttgcgcgacggcgggcagggacgtacgtggtcgcccttgcagagccggcagacaatcttcttaaccttgaggccgcccttgtcggcgtcctcgggctccttggtctcctcggccgccttgccggccgcaagcttgaactgcatgttctcagcgaccgtcgtcgttgccgcagccgggccgggggcatttccgcgctcggcaccgaacctaaggcagggcaaggaaagcgggcgagggtcagcgccgacagaggagaggtccgttagcaagtaaggggccgcacttagcccagcccttgcgctcagcaacaatgtgcgagacagcctgcttcgagagaacgcgcttgatgcgacgggtcacctgtcgggaagaagcagacggccggggtcagcgagctgcagtggcgtgactggagagccaacccctcgacgacgccatgcgctccgtcgtttgacagaaagccgagggccggcgacgatgtctcccgcttcgagcaggaagcagcagtcgtcccggctatgctcgccctaggcagcccgctccggtgcggaacgtaccttgaccttcttgccgtcgtcgttgagcttgtactcgacgacagtgatgatgccgtcggcgccgaccgtctcggtcttggcgggcagggcctctaacgggcacacgagcagggagagagtcaggagacgatctcaagcaggcgggtaagggcgggacgaggagacgcaccggcctcgtcgacgtcgtccgcccagttggtctttgttctgtaggagcggcggcgcggggcaggagcaggcggtcagcttctagacgtccacctttgacggcagagatgccaggacgagggacgcacgcgtcggccatcgtcgagtgttgatctgctagggagatcttttaggaggagagagagagagggtcgtaggaagcggtcgttgcaggctggcgaggagggaggagaggtccgattctcacgccgaggccctgcgcgcgcgcgcgctgctgtcgctgagggccgctccgtttttgaaaaccgcctcccgagtcgcgccgcccggccgcccactcgcccgcaccggccagcccagcccagcccagctcgcaggcagacgacctccgcctgccgctctcgccaaccctcttcctcgcccgcctctcctctctctctccagcagcagcagcagcagctcccgccagacatgacgcgcaagcccgtcggcaagatcaccaagcatgccgagatgctccgtgtcgcccggggcgtcgccaagcgggcaaacgaccccgtctgggtgcggagccagctcggtgcgtcctcgtcttctcgagcagcagctcttcctacactcgtgcctacgacctccaaggggcccggataagacctgctcggcagcatggtactccctacgcccctgcgattgaggccagaggcgatggccctcggccgcacggcggctcgacttgtcgcctctccctattcgggccggcgcgcgaagccgtcctcgtcgtcgggtcgacggtcgtcttcttgtcgataagggcctggtcgccgctgcctgctcggctcctccatcccctagtcgcatgttgtggggtggcccttaaacgccgcacgcggctgacctccgtgctccgcctctgccgtttgtccagccgcgcacgagcagccgccacgacgaccgcgatttgccccgccgcagccgttgttgtacccgacaccgcggaccgctgccgtcgaggagatgcggaagagcaagacgccggcgaccgagggaatggccgacatgcgcgagtctttgagcgacgtcttccacctgccacagccgtccgaggcctacccgcacgaagcccaagccttcacgaaagagctcgcgcttcagatgacgacgcacccgagctcagagacggttcacatcggtctcgcgccgcacaacctccggctcgccttctacggccggcgcctgctctcactccacttccagcttttcctgctcgaggcgagtcggcatgccggcccggcagcgatcgccgtcggcggaggctactttgccaacccggtcgacacgcgccaggacggcccgtcacagaccaagcggtcgtctcgcggcgacgggacgcctcaggggctcgaggacgccatcattggtgacgacgcgctgctcggccgctacgtcggctactcgtggaaggtcaaggagctcaccagctggcgctacaaaaagggctacgacgcgcgcgcggtcattgtccagagcatgatcggcggaattgcgcacgcatacgtgagtcctgctcgcttcgatgatggggttgcgtggcggatgaaggtcgaggagtatgggccagcgccggctcaggaactgtagcagtcgacgaggcccgacgaggaggccacctgttgttggcgcacaaaaagcgctctagggcatttgcgccgccaggatgaggacctccggtccgatggggagggggggggggcgcggaaagggccctcggccgtcggagcccaggctatgccggcggcgcttggccgtctacgtgcgagctaggcttgccgagcgacgttcgtcgttcttctgcctctagctctgggaggcctctcttggccacactacggccgcgatcgcgatttggacacttcgactgaccttctccctcaacatctgaacacgcgctctcacccagggcacgccggcgacgcagcgcatctttctcgtcgacttcctcccgcgcatcaaggctgccctgccggagtggctccagcaggaggtcaagcggcagctcgcccgggtcgtcaagcaggacggcgtctggggaccggtcctgcccagcggcggcttggtagagggcggcaagtcaagagaggcggtctcgccgccgccagaggctggggtcgggcagggctccgagacgaccggggcgtgatacaagcatgatcttagaaagcacgggcaggctcgggcagcgtcgtcccgtcagcaagctttcaaggaacgagagaaagaaggcatttttagcggtcggaggttgggcagaggcgttgggatgcgtggacggcacgaagcggcggcgccggtcgtcgcaaccacacccttaaccgtcacccgcacctcctcgcccaccctttgcaccctccctcaagccttctcaccgctctctctctcgcgcgcgacaccttaccgttcgcccgatgtcatccatccaggtctcgctcgctctgccggcaccgctcccggcctgccggctaacggtcgccgaccccgccgccacctcagtcggctcgctccttccggcccacctcgccagctcttgctacctccgcacgcgctctgtcatccccgcgccgtcgacggcgctttcggccctgctcgcctcaggccagaccgagctcgacctggctgtctgcgcgaggctgctcggcggcaagggtggctttggggcgcagctccgagcaacgggaggccggatgtcgagccagaaggcgagcaacaacgactcgtgccgggacctcaccggccggcggctctcgtccatcaaggaggccaagaagtacgtcctactgcttgcctcggctgatgcttgaggaattcagtgtggttgaggtgggcttgcccgcgtgctgatcgagcttccattctctcctcccggccgcaggatgagcgacatcctcgaggcccaggactacaagaagctcaagtcgcaggcggccaaggagaagcttgaagcgctggagcgctcgctcggcatttcggccggccaggctgccgccgcgctcgaggacatggccgacgaggagcccgctgctgaggacgagccttacggtttcggctcgcgctcgccgaccgagggtggcgataagccggccgccgagcgcaaggcggcgccaaaggccaaagacctgacgaagcaggacctcgcccagctcgctggccggaagcacaagtttgacgactccgagttcctcgagcaaagccgcgagatcaacgagagcgtccggggtgcggtcgccgctggtgcgtccttctctctgcatgctcgtcgattgaacagcctatcctgaatcatctcgtcggccctcatccttgcaggcctgctcaagaagcgcaagaaggctaggacggcagcggccgacgcgtctgagtccacgaccgcgacggcgctggcatcggtcgccgtctgagctcgccctccgttctctccctcaccgactcaaaagagggaccttcggaacgaccgctctagctcgccaaccacctcccttcttgcgtcgtttccatctgatcctgctgcagtcgggaggccctctcctcgtcctgcagcggtcccgcgtaactcttcacccgtcttgttgcacctgtccccttttgcctctcctctctgcgctcctcgcgctctgtaccatctagtcatcggaagacgcctgctctcttatcctcgtcgcttccgtcaggtttttgagccgcgagctcagcaacgctggctggctgcgcctcggcatgtcggccgcccgcgcgacgaacgagctgccagacgcccccccgaccgcaatcagctcctgtgcctctcgcgtctgccagcagcctcctaagctcgcctgacgcttgcacgatggacgtcgaatctgccggcatcaacgccgtcgctagcgggagcggcagccggatgcttcgcgtccctgaggccgtttacaaggaccgggtgccgccggtcaacgactaccgaccggcgcatgccgagtcgagctgcccgctcatcatcgacaacggtgcggccctaagccagctggtctcgctgcatgctgaagcaagctcgctgaccgccgctccgtccccctcaggtagctcgcagctccgagcaggatggggcgacgaggcagcgccgcgcctcatcgccgaccaggtcgtcgcgcgctaccgcgaccgcaagacgaaccggacgcacctgctcgtcggcgccgacaccgaggtcgatgcgaccagtcggtcgagcgccaagcccgtcttcgagggcgacgtgctcaccaactttgagaacatggtgcgggctcacagcaggagcggcttcgaggcgagatgatgctgaggctgaccgaccgtccgacccgggcaggagcacgcccttgaccatgccttcatcaacctcggcatcgacaccgagtcggtcgcccatccgattctcatgacggagaggctcgcgacgccgctcgcgtctcgtgccagtccgtctgcttgccgcttgcgcgcaccttatcgcgggcgtcctctgctgacgtctggcctccgctgttcgctcgtagtgatgtctgagctcctctttgagggctatggcgcgccttcagtcgcatacggcatcgactcgctcttctcctttgccaggactgggctgagggacggcctcgcggtcggcatgggccatcagagcacgaccctgatccctgtcgtggacgggcgcggcgttctgagctcggctcggaggttcgcgatggccagaccttctacacctaggagaagcactgactgggacatccctcacttgcaggctcgcgtggggcggcgcgcaggcgcaggatctcctgcagcgcctcgtgcagctcaagtacccaagctttccgaacaagatccagcccttccaggccacggtcagtcggccgcagacgctccctgtccttgagctcagcttgttgctgacaacgtatgggcgcgccctcgtagttcatggcgcgcgagtcgctttactttgcagacgactttggcgacgaggtgcgcgccctcgccgacccaaagatgctcgcagagaagagcgtcatcatgcagtttccattcacagctccggtacgtcctctgtccgacgtgattggctcatcgggttggtgctgacctctgcgcgctctccaggttatggaagagaagtcggccgaggagattgcgcggacggcagagaagcgtaaggagtctggtcggcggctccaagagatcacgcagaaggcccggctcgagaaggtgcttcgcagtttgctgttctctgctcgacgccagaagctcaaggcctctgatcgctccttcgcccgcagatgatcgagaacgagcgagagattgccgagctgagagacgtcaaggctgccaaggacaagctcaagaaggcagactaccaggtgcgcgggcccgatgcggcaatcgcaccctcgctcgactttgctgactgtactcggctcgtcccgcagaaacgtctcgagaacgccggcttcgaagacgagcgcgagctcgaccagcgcattaagaagattgacgagtatcttcggcggacgcgcaagaaggacgtcggcgagctcgaggagccggccgaggagccgacgttcccgctcatcgaccggcccgacgccgacctgactgaggacgagatcaaggagaagcgcaaacagaagctctacaaggccggctacgacgcgcggatgaagatcaaggcagagaaggcggcagagaaggcgcgggcggtgcgtctcttccgcttcaccgcttttaagcaaagaatcgtctgctgaccccgcttcgactgctttacaggacgaggccgagcgcaaggacgaggccgaccgactggccgacccaaagcagtgggcgtccaagctgcgcgaggagcaggaggtccggctcttcagacctggagatctgaaggagcccgccctgactagcgctgtctttcctctgcaggccatgatcttgcgcatcacggagcgcaagcggaagaagtcggccctcggcgaccgcaagagcgcggccgcccagagtcggatgaaaaacattgccgacctcgccgcagacgggccggcgccaaagaagaaacgcaagggcaatgacggtgggttcgcccctcgactttgccagacgcttcgaggctgatgagacccgccgcattcacatagatgacggctttggccagcgggacgacgactgggccgtctaccgcgagattgacggcgccgacatggaggaggacgaggaggacgatgtcgcgtacctgatctcggtcgaggccaaactgctcgagcacgactcgaccttcaccgccgccgacacgttcgaggcgcggtcgggccagcaaaacgcgctcctcgcggccttcctccgaggcgggtcggccgagccgttccgggccgacgacctcgcccagagcttccaagtccatctcaacctcgagcggagccgcgtgcccgaaacgtggttccagccgcacctcgccggcctcgacagcgccggcctgggcgaggtcatcggccacatccttcgcgagctgccctcaccgacgcaggcgcgcgtccagcgcggcatcctggccaccggcggctcggcggcgctccctgggcttcgcgttcggctcgagaacacgcttcggccggtcctgccgtacaagagcgagttccgggtcctgctcccgccggcgggcgatgagcgcgtcgacgcctggaagggcatggcttcctacagccagactgccgagttccgccaggtcggcgtcagccgcgcagagtacgacgagcatggcggcgagtggatcaaagagagcgcgtggggcaactggcggacgagctgaggcctccccatctcatgctgtgtcgccgccctttgtcaacacgcggccctcgcggtttcgaaattaagcgaccatccatcacccgccatccgccggcaccgccatcgctctcggcggctctggctctatctcgaccgtcgtcttcggcccctggctgacgtgccgatcgtaaaacgggatagttcgctgaggccgcgctggtagcggtggcagctcgagcgagtcggcggccgagcagctctgggtggcctcctgcagtgcggggggggggggtcagatgcgtcaatcagcgcctgataggatgagcgagatcatgcgcaatcagagatgtaccagtgtcgaggcctcgaggccggcctcgagcgattcgagcaacgtgcaggctttctgaggggcaagggcaagggcgtcagggctgcgtctggcacgcaaagtggggaggctgacaactcacgcagaggtcgttgctcgacatatagccgcagcggagacacgtctgctgcgccttgagattcttgcgcgcaacctcggagaggacaaggtcctcgcccgacttaatgatgtcgatgatggtcgacgcccggagcgcctcgagggacttgagaaaggtccgggcgtggccgcggtaggctggagagcgggtcaaagagtcagtcctggccggccaaccttttgcagagcgacggacgaccgaccttcgggcgagtagatgcactcggttgagaagtagtcgagccgcttgaagtaggcgtacctggggcggagaggggagaggtcggcaaggaagatgtcgacaacccgggcgagcgccctccggctcacatgacaatctccttctcgtaggtgtacttgaagggcttgctgcgccggatcgtgtcctcgccccgggtgacgatgtcggtgcagcggctgagtcgagcgacatcgccgcgcatgactggaccgcacggcaagacgcgtcagcatccgtcaaactcaagcaaccctcgtggcctggaccttgaaactcactgttcatcaggatcgtctcggcaatgtcgtcagcgttatggccggtgaggatgtggtcgacgccgagctgcgcggcgccgcggtcgagcgcctgtcgccggaaaacgccgcagaaggtacctgaaggcagggaacaaggcggcacacgtcagcgaaggtagatttgggctcgaacaatgcaggcagacacgcacagttattcttctttccgatcgtagagacgatccggtccatcgtccagccgtacaggtcgtcatagctcaaaatcttgagcgggagctcgtactgctgctggtttcgcttgaccgtctggagtgaagtaatagcagcgagcaagcatcgtcagcgaggtggtctctctgagctggagcgacggacgccaggctgcggaggggcgatccaaggcaaggaccgacctcgagcgagtcgtcgcggtagccagtgatgccctcgtcgattgatagcaggaacaggtcgagaccataggcgtagcggtcgttgagtaccttcatgatgtgtgcgagcacggtcgagtctgtcgtcaagggagcgtcagccgaccctccgtctccgcttgctgctgctgctgctgctgctgcgaagacgcacgcacctttgccgccgctcgctccgatggcgaccttgtcgcccggctcgaacagctcagcctggatgatcgtccggtggatctcttcctcaaagacgtaaaagaagcacgccttgcagacctgctgcgacgtctttggccgcttgaggatggcccgggcggtcccgcacagctggcagaggcggggcggcatggcagccgctgcggtcggcttgagagacctcctgagttggcgagtagctgaagcctggcttgaagtcgacttaacagcgtctgttggccggacctgtgcgagggactgtcaagtggggaaggtgcaggttggagagcaggcgagaaggcagctcaaaggacgagcgagagagctgcgccacgactcacgcgggaaacggtcgccggcccgtcgtccatgcgttgtcgaatttggcatgacggcacatgtcgagaaatctttcgacctacgcgggctggcagaatgagacaaggacacagagatcatgacagacggcaaagagtgtggtacaaccgagagggaaagaaaaagacataaggtcgactggccgcgctgctcagagctttggaccggcccggccctccttaagtgcggccgtcagccggcggccgaggtcgggcgagacgcgcgagaagtgcttgagctgacggtcgataatgtcgggccgagtgacggcacccatgtggccagcgacgttctgaggaagaaacaaccggcgcctgtcagtcgacgggcgcaaggggcatcgagtgagtggccgacgtacctcgacgaaacgctcgcgcgcaccgtcgtcaaagacgcgctcccagaggacgctggaggacgcgcgaagaggagcaagatggatacggtcagcacagatcggagccgggcgacctgaccttctgcacaaacgcaccgcggctgctcaaagtcgatgttggcgatctcggacgtcgtcaggatgacaccggggccctcgtgcttgtcggcaatctgggcgagcgtgtacggccgctcggcgtacttcatcggctcagccgacgacgggtagttgggcgcactgccgccgttagcgtcggtcgtcgccgcgccgctccggtgataatttgacgtcgcatacgggcagttgacggggatcgacttgtagttctggccaaggcggtacctctgagcgtctgggtaggcgaacagcctcgactggaggaccgggtcgttcgagggctccatgcccgggatcaggtgcgagggcgagaaggcggcctgctcgatctgcagaggaaaattatcaggaaacgtttaggccaggcagatcgatcagccagcggcaagacggccgaggcttacctgggcaaagtagttgatagggttctcgttgagcgtgaacttcgcgatcttgcgcatcgggaactcgcctttcggccagacctgatcgaggaggcagacggtcagcgaaggctgccggagcacccaggacggaaaggacgaaccttcgtcaggtcgttgaccgagtagcggaacttggcggcctgctcggccgtcatcgtctggaccgagaccgtccacgtcgggaactccttgcgggcgatcgcctcgaagaggtcctgggttgccgagtctgggttcgagccgtcgagggcagcggcctcggccgctgtatgcgtcttaaagccgaggtccgactcgtagtggatctggacgtactgccactcggacttgtcgttgacccacttcatcgtgtggccgacccagccgtgcatgtgccggaacgagaggggtgtgccgcggtcgccaaagaggaaaaagagctggtgaatgctctcagggttctgagagaggtagtcccagaaaacgttggcgtccttgaggttcgtttgcgggttgcgcttctctgtgggacaagcagcgcgtgcgtgcgttagcgaccgtctgaaccgggtggcagcacgaccaaaagggacttccgggtgtgaataaatacggggaagcgtgcgggatcccgcaagaagaagacgggtgtgttgttgccgacccagtcgaggttgccctcctccgtcttgacttttgatcgaggagacagacggtcagcggaggcagccggagtgcgaccttagcgcagcgcacccttgagcgaaaaccctctcggatcgcgcgccgagtcagacgagcccgactcgccgccgacggtcgagaagcgtgcgacgatcggagccttggtgcccggcttggcgagctgtgaatacgagagcgagagacggtcagtcttgtcgttcgcgcagcggcggcgctaaacgaaagggggtttaccgcggcgcaacagaggtcctcgaagccgccgtcgagcgtctcccattctccaaacgctccagcacccttggcgtggacgacccgctcgggtatgcgctcgcggttaaacgcggtcagggtatcactggagaggaggtagagggatgatcgcgcgtcagacgaagtcagccgacctgcgcggaggacgggacgtcggagggagcgaggggattcacatcagctggaagtcttgcaacaacagcggcccctctttgccggccatttgatgatggattgcgctctcgcgaggaacacctgcaagccagccagatgatggaaaggtgtcagccagagcgagcccggagccaacgcctgaggctgggcgacaggcgcccaggcccgatgccccgccaggctgactgaccattgctgtcggtgaacaggcactgggcgaacgaaggcgtcgagctgggcatcctggctgagtatatgagggggctggcgagaagagacggtgggagtttgagacgacagacgagcgagcgagcgagtgaacgacaggcgatgggtttcctcggcagcgcgcgcggcaagcgttcgaagcgccgcggccgcgcggcgacctccgaacgtgaccctcttggtggatggccgcggcgcctgagacagactaacactttctgctctcgagacagtctcgtctgctttgaaaattatggtcgcaacacgccctggcatgtgccctcgacgtcaacgacctcctttgggcagttggccgtcagaacgaccgggccgtccttcgtgaagaggacgtcgtcctgcagcgcgacaggagggtcagtctctctctcttcctctcttctcgagcgagtgactttagctcgagacgcacctcgatgcggatgccgagaccgtggaagtgcttcgggtagcgagaactgaacgggacgtagacgctgccgagacgcggagagaagctgatcagcatagaaggccaacgatgggcagagtgacaaggtcaggacgcacccgggctcgatcgtcgtgacattgccggccttgtatgcggcgtccttgcgcatcgttgggcagtcgtgcaggtccatccccaggaaatgcgacaggccgtgcggatactgccatcggccaagaataatcagttcctgttgtttcgattgagggtcggtcgggcgagggaccgcaccagttccgccgtcgacgcgtccgagttgaggttgaagccgatctggttcagctcctcgcgcatcatccgcacgccttttgccgggggaaaggcgtagtcagtcagccggccaaatctgtgcaagagcgacagcgagcgcagggactcactcgccgtgtgcatcgagttggacgaccaattctggtcgagctcgcagagggcgatgcagcgcttgttgacctgtaggacggcctcgtagaggtctcgctgggccgaagaaaatgtgcccgagacaggaaacgtccgcgtaatgtcgctcgcgtacgagtcgagctcggccccggcgtcgatgaggacgagctcgccctcctggagcaagcagtcgttctcggtgtagtgtatgacgagcgaattggcgcccgaggcgacgacgggcacgtaggccggccgctgggagccagcgaggccgcagacgtactcaaagtgagcgacgaggtgcgcctcggacgcgcccggctcggcaaagcgcatgacctgtgagaggcggggcagtcagcttagcgcagaggagcccgtcgcgcgagacggtcctcacctcagcatgcgccttggccgagatgtcggccgcagccttcatgatccgaacctcggcctcgctcttgatgccccggagctcgtgcacaagtccagctagcggcttgaccttgttggccggcagcttgccgagcgaggcgtccgtctcgaccgaagattgggcgtacggcagtagactcgagaagaaggagcgcttcgactttgacggcggcaggtcgatgtagacggtgctcgtttgcggaaggagcgcgccgagaatgtcgggcaggcgtgagagcgcaaaggcctgccatgaagcggagacatccacagcagcggtcagcctgctgggtctcgcaccgagcgacgctgcagcctagagagagacgcacctcgtccgcatgaaagagctcgacagcgcccttgaggcccgaccggccgccgtcccagaggtcgctctgcgctgtccgcagcgggacaaagagagtcatgcgatagcctcgtggcatgctgtcgtctctttctgcgaggagaaggccacgcgttgtgcaagggttggcatgagatggacagctgtcgctcgacgctctcagggcacgcacgaaggatgagggccgagtcgggctcgttgaaaccggtcaggtacatgaagtcggtctgctgccgaaacttgtgactggacgggcgagatcgtcgtcagccgagggtgacggcgcgattcgagttcgaggagtgacgtacaagatgtctgtacgcgagagagcatgggggccagatgtcagcggatccgggtgccgcctcaaagaacgcgctgcacgtactctgactgctgtactggatcttggcgcccaagaggacgacgatcccgcccggtgcgagcttggcgacgagccgctgccgacggtcctcaaagtcggcggcagagaggcctggccggacctcgtctggcgcgagcaggtgagggtgcgtgagcgacgtcggctggccccagcgcggcggcttgaagggtgatggcggcggaggcgacgtcgccgaggcaaagcatcgcgactgagacgagcgaggcagcggtcgcgcatgtgtgggcagtcgaggtcgagctgaaggacaggagtgctggtcagcacggctgccggaggagagaagctcaacgccggagctcacgagctatcggtcggaggggtgcgacgagctgtggccgccgcgacgtcgacgcgccgagcttgccgatagtcgagctgcttttcgaggtcatcacctatgcagatgccggcgtgcaagaagaagtacgtgaagaagctgatggacgggggttgatgccaagaagggtcggatgttgacgaggggcaaggcgcgcgggctgaagcagcggccggccgaaccgcagagacgacatgcgttctgtgactcctcactcgccacgtgcgacgactatctgttgctcttttgattcatgcagtacgcgatgagagtctctgacgacgagcatgctcttgtaatcgtagcggcttagaccctcctccccccctcgacttcagaagcgcgagtcgcaccagcgtggccactcgcatgcacacgaccggtcttcccccttgaggacggtccggaatgtcaagctgtagcgatcctgccgaggcctgagagtttctccgtacgtgccgaccggatcagcccgccgcggtcggatgccatgcgtgaaggcgtagcggctcggacccgtgagcacgagtagtgaccgcggcggcaggtcgatcaggacagactgggtctcttctacaggagatggcgacggcttgcactgcgacgttggcggcgtcgaggcgttggggtcggtcgaaaggctgcgcttgggcacgcgcatccggcgagcctcggcctcgccgcactgcttgagctccatcgtgacggtgctgccgaggctgacgccccagatgacgtcgccaaagggcgagctaggagacagagaggttcagtcagacggtcagccgactacgtcttgctgtcaggccctcgcgagctggacgcactgggtgtcgacgtgcggcgggatgccgctccctcctgggtagagctgaccggtcatttgatcgaccggccggcctgggtcctgatacggaagcgaagccatgagtgaagtcgcccaggcggggatcggattgacgaggccctttgttgcgtttgtcgctgccgcggcgatgggtcgtcagatggtcagccaaggctttcacaacccccgagcactgcgtcgagctcactgtagtcgaagtgcgggccgaagtgcacctgaggaacagaaagagcggtcagcgtccactgcaagaacctgccgtccatcagggagagaaacccaccgagagacgcttctctgcacctgccgaccagtcgccgacctcgcgcatgcgctggatgagcgcccgctcctcggcctcggtcacaaagtcgtaccagacctcgactccacacgaccaggctcgtcttccgggcgcgacctcgaccgcgccctcagcggcaaagtcgcccgggacggctgggagccgggcgtcgacggcgctcggccgggcgagctccaggaataggggtttaagattggcgccagtcgcctggcgggcgggctggtcgagtacagctttgagagcactcgacggcgacaggaaccgaagcagcgagtacggctggcgagaagaagcgctggatatgtcagcagtcgttggcgcaagctggcgcgggacgagggagacgagctcgactgactgctcctatgatcggtacccaaagcggccggtcttgtccagcaaaatggtcgagcagctcggcccgccggagctcgagtggccctccgagctcgcagtagttgacggcccaaacccagggcgagccactgctatcgccgtcgccttccagtgcctgcgcatcggcagcatcgtcggccgagaggacgagctcgtcgagcgagcgcgcgcctgaccggcggaggaatgcgccatagacccgggccctcgtccggtcgaccgccttggcgacggcagagactggaggttgtatcgtccagaaaacagccgcttcgcccttgctgcggccaaacgggcgagagaaggtcaagtcagggtggccgttggcaggcaacgagaaagggagctttcggcgcggccaaccgaatcgaaggcccggggtcgctttcagcccagccagcctcctccctccaacgtcctctctcttaccccactccagtcatgcctgccccgcccaacaatccgagcgatccgaatctgaacggccagggcgctccgccgaacggtgagtgcggtcgcggtcgctcggtcgctggcgagcgcctggcctgacttcggctgcgggccacgttctcccccctcctctgccacaggctcgtcgtcgactaggtcgggcctgccgacgcacctgtacgagcgggtgccagcgcacctgatgagcgaggatgctaacggtgaccggacgcccgactacctcaagatgatcctcctctccaaggtctactcgccgccgctcaacatgaaggagacgccgctcaccaaggccgtcaacctctcggccaagctcggcaacgagatctggctcaagcgcgaggagctccaggaggtctttagcttcaaaatccggggcgcctacaactttatgagctcgcttgaccccgaagagcgctggaagggcgtcgtgacgtgcagtgccggtgcgtctctccgactctcggcgcagcacagcaaggatgactcgatgggaagctgatcggacctcattctgcctctcgccccgcgccaggtaatcacgcccagggcgtcgcgctcgccggctacaagcttgggattccgtgtacgatcgtcatgccggtcgcgacgccgacgatcaagtggcgcaacgttgagcgcctcggggccaagattgtcctccacggcgaggactttgaccaagccaaggccgagtgcgcccggctcgcaaagcagtttggtctcgtctacgtaccgccttacgaccaccccctcgttatcgccggccagggcacgatcgcgatggaggtcctccgccagctgccagacgccgacacgctcgacggcatgttcggctcgatcggcggcggcgggctcgtcagcggcctgtgctcgtacgtcaagaacgtcgcgccagagagtcttaaggtctacggcgtcgagacggtcgacggcgacgcgatggaccggagtctggccgccggcgagcgcatcacgctcgatgaggtcggcgccttcagcgacggcacggccgttaagattgtcggcgaggagccgttccgcatctgccagaagcagctcgacggcgtcgagatttgcacgaacgacgagatctgcgccgccatgcgcgacatctttgagggtgggtcgtcttaactcgagctgtcgttgaagagagacgcccgctaaccgtcgcgccttcttgctggccgagcagagacacggacggtgcccgagccgtcgggtgcgctggggctggccggcctcaagtcgcacatcttcaaaaataatctccagggtaagggcaagcgctttgtcgccatcgtctcaggcgcaaatgtcaacttcggtcggatgaagtttgtcgccgaccgggccgagctcggagagcgccgcgaggtgctgatgagtgtcgtcatccccgaggtccctggagggtgcgtcacggtctgctgtctcgtctgcagcacctcggccgctgacatgctcttcttcgacgatgccagcttccttcgcttccactcgttcatccacccgcgggccatcaccgagtttgcgtatcgcgtcggcccggaccagacgtcgacccggagcgcgccgatctttgtctcgttcctgctctcgtcaaagtcgacctcgggcccgacacccgaggagcgccagacggcggttgacggcctcatccagcagctcaaggacgacgacgtcgaggcctgggacctgagcaacgacgagatgagcaaggatcacgtccgatacatgctcggcggcaagacgcgggtcgatggcgagcgcgcctttatgtttggtgcgtcacactttcgaccgactcttcttgcgagtcacgggctgactctcgcaccttccggtttgcagagttccccgagcggccgaatgccctgtacaagttccttcacaacctcgaggacgcccggggcggcaagccctggaatatcacgctcttccactatcgaaatcagggcgccggtcagtcatgacgttgacccactcgcctccgtccaatgctgacctcgtccgctcctgccagatctcggcaaggtcctcatcggcatccagtcgccaccggaggacaacgaggcgttcgagaagtttttggacgacctcgcctatccatacaaggagatgaccgacaatgccgtctaccggcgctatctcagggaatagatgactcgcacgagcaggaaggaaggagggtgcgagcagagaggacggtgcgccagctgtcgatgcagaggcgcgcagcagcggggagaccgagcaagccgcctcttgtctccgctacgaacaaggtcgagcaagagagcccagactgctgccagctgtgtcttctgccagctgcgttacgttgggtctggcaagctgtcggtcaagctaaagaggcagaaaggcaacggcttgctcgacggcagtgcgagccgccacctgcttgctccctccaccagcccacccctccctcgccctcacgacatcgacaacacccagcctccctccctcctcttcctctcctcgcctgattcccctccccaccacacgcgaagcagctgccccggaaccgatgtcttccctggccgcctcgtcgtcagacgtcctcgagctgtcccagcctttggcgggcggcagcaggcctcgagcgggcgtcccctcgcgaccgtactcgcgcccttcacctgcaccacctcctgccggctcagagacggacagcgacggcagctcgaccgacctcgaggacggcagccggttcagcgtcatccctgacaatgctcgatctggcggcgcccagccagcggccggacccagcaacggcggcacagcagcctcgtcgtcccgcagcgctcggcgaccacccagcccagcagtcgccccgtcgggcggtctgagcagaagtcctccaaacgttgcacgaccgacccctcgccatcggcggtcctcatcgtcctctgtcgtctgcctcgccgacgacgataacgagcaacctgtggctggaccgagccgcgcgcgagcggtccctgcgccaatggccagcagtgacgacgacgacgacgctgagattcagatcgcaggcgagactggcccgcggcaccggaggacgggccttgctctggccaactatgtcgccggttagtgtcctggagccttgcccgccggttgaacgaggggccgacatgttgaccagcgaacccgctccctgtgcatccagatctccgtcgcagccagcgtcggtcgcctcctccgccggtccgccgtcgcgcgtcgacgccgccggtacctccacaagcggtccgttttggcggcgccatcttgcgcgagaacggcgtcaaccggcacgcccggttgtctgctgctggaggccccgtcgcgccgccgccacggcgcagtgcatccccgatggtcgctctgccggcgccggcgcccggcccgttcaacgccgttcgtcaggctctccagggcctcggcgacctagctttctacggtctgggcgacatcttcatcaacggccagccctaccggggcgctggctaccagggcaacggcgttggcggcggcggcgagtaccttcatcagggcggggacgcgcctcggcttggctggggtcaggcgccgccgggggagcagaaccggcacctgccgctcctccagcatcagcagtggcagcaggtctatgccccgccggtgacgccgcagaagctcgaagacacttggcgcgaggccggcgcgtttgacccgccgccggcgatcaagacgacgcgcggcttcacgcgcaactttgagcgcgagttcggcggctacctctcggactcggaggatgacggggccgacgtcgacgcgcttttcgatcccggacccgtcgccggaccctccaagccgggcccgggccctgcctgggagccagtcgtgctcgacttgacggacgactcggacaacgacgagattgccatcgtcgaggccgacggccagacgtcgtacgtcagcggcagcacaccgctcggtctaacgccgctcggctctccaccaccgagcctcgtcgcacagactgtccgcacccggaagcgcaaggcgccgagcgtcgaggaagcgccgcccgtcatgaagctcgtctgccccggttgcaaccggccgctcatcctccaggcggcgacggcctcgcgcaagatgcacgtccttgcctgcggccaccttatcgacggctactgtctcgactacctgtcacgcccgccgggttcagagggtccagcctctgcggccgccgccgccgccttgctcggccagctcaagccggcgcctccgccgacaggcgcgacccggaccaagggcaaagggcgcgcgccaccgacgccgcgcaagaaggtcttcaagtggaactgcccggtcgagtcgtgcgaccgtgagcacgcgagcgaagggacgccggctgagggcgacggcggtgacgagccccgctacgtctggaaggcaaaggccggcaagggcggcgtccttccactctacgcttgatcctgtcggccgtcctccttcattgcacacgcccttcctcacgctgcccctcactgattccttcgccagctcttgtcctgcttcgctgcacgagaggccatgcccatcaatgaccattgacgcccttctcctcggcagccggttcagacgactcctcgtcagcgtcctcgatggccgcgccatcggcgacgggccagacgatgaccgactcaaattgctgggaagggaagagcgcgaggccgagtcagtgatgtgcaggcgggccttgcagcggagctacgcacttcgagtcgggcctgcgtcgagacaaagaggaggacatgcgatagcggacaggatcgaccggggccagattcggataggaggggtgcggacagcttagtacgggttgaagcgcgtctgcgggttgacgaaatcgctcctcaccctgccggccgcgctaagctcctcgccatcctcgccggtgaagggcacaaagtcggccgggacggcgtacatgccctcgtcgtcgtccgaaaagccatcgacgttgtcaaagacggacgggtggagcgaggcacactcggagagtgcgctaaatatcggctcgactgcgggcgaggcgagcaggacgggattagcctggcacccctctcagacgccaaggaagcgcgcgggcgactgaccgtcagactcgtcgacgaggatgcacatctcccgcattggcgagtcgtcgtcctcctcgtcctccgggtggtagtggccgtcgttctcgcggccctcgatgatccgcgtcggcctcggcaccgactggcccgccgccggtgactcgtcgagctgacagtagatggatgggcccgagtcgtcgcgagagatggcgtgcagagtaatcgacgggtagtcgagcgagaagccgggatggctaccggcagccgggacaaagcagagggcgctgatggagggaagaggcggcaggtcgctgatcaacctcgcgagctggtcgcctagctgcagccagctcggacgtacgcctcggtgatgtagagcgagcccgacacgccctcgctgtagccctcccattcaggcgagaaggagacccgggcgttctgctgctggcggcggaggacggtcgggatcgatgcgaacgaggccggcgtcgacgaggtgagggcggcgtgctcctcgggcgagacagaagtcctgcgacgggcaagggcaagactttcagattccactctactgtactcgagccgctccccctgggtttcacgtacggcggctgactgattttggtgagcatcttggcgagaagtgagggaggatgcggtcggagggctgaaggagcctcaagccggccggctcgaacccaagccgccgccttcaggcgccccgcgccgcatgcttccgccgacggccttccctcctgccttgccctcgacaccatctcaagcaagcaggccggacaactagacgctcaagggctctccgaagacgacgcctgggacctagcacgccgagctcaaatctctcagcggcgtcctctaccctcccgtgcgaccgcgccgccctcgacagccgcttcaacctccgagctcgactcgctctccgtggcccttctaatcgctgttgcccttctcaacctggcgatagcagaggcgagccaccgtgttactgccgtcaatgcgcgttcatcaagccgtcatgctcggaggcggaggtgttgggaagagtgccttgacgtgcgtcggctcccgttcgaccgccctgacgctactcaagtcgctgcccgctgaccttcgtgccgccgtcgccatcactccagcgttcagatggtccatcagcgcgtcgtcgagtcctacgacccgacgatcgaagatagctgtcagtcctgctacctagaggccaagcaggcagcgtcgcggatcaaagggcagcggaaggctgacttggcatgctgctgcgcttccctttgacgcgtgtcgccgttcgcccgcagaccgcacaaacgtcctagtgcgtgagtgcccctctatttcgactgaggacaggactgacgaccatgatgacattgttgcagaggatcgacggcgaggcttgcctgattgacattctcgacaccgccggccaagaacgatatacaagccttactgacctttacatccgccagggcgaggccttcattctcgtctatgcgtgggtcctagagtgctcccgaggctctgctgtcacaagggaccttgcctcaccatcgacagatctctgctgacccttcctgcgcctcctgtcgacagggtgacggaccacacgtcctttctcgaggtcaaggaccttcgccagcagatcgtccgcatcaaagacggccagtcgggcaccggcgtgcctatcgtcctcgtcggaagtgcgtcacgcctgcctcagtgcccgggaattgctttgctgacgagatgatcttgcgcgacgcccgcagacaagatggatctcgagagcgagcgcgaggtcgagacggccgagggtaagcaactggcgagggtatggaactgtccgtttcacgaagtcagtcgcaagatggcgattagcaggctgtcagagttggcgctgacccatctgcctgccctcagacatcagctgtaagttactcgtcacgcggagtgggaccggcctccctcttgctgacctccgctccgtctcctacgccgctcgagcagaagaaggacatcaatgtccgcgagacgctccacgacgccgtccgcgagtgccgccgctttgagccggccgagcctgtggccgaacagacgtcagctttcccacgcgggggcgaaggggacagtcggcggcggaggaggaggcgagggatgggacagtgcacgatcctgtgagcggctcccttccggcattctgggccctcacgcccccacacacgtccagctgcacagacgtcagtagcccggcgagcctccatccctcccatagtcgatctctcgcaacaccatcggtcgtcacgtttccttcccttcgccctcctgcctctcctcctgctcggccgcctccatctccctcggcttctggaccttgtcggccagaccaaagtcgacggcggccgcgggcgtcagatagaagtcacggtccatggccgttcctggaagaaatggcgtcgatcacagagattgtcagcgagcgattcgacggcctgcaatgcaaagtcgcgcaaccgaagaaagcgataaggtcggtggaggggcggggggggacgaacggaagcgcttcttgccgtcctcgacagactcgccctcacgcttgcagtgctcccagtagagcccctcgagcaggtcgcgttggcggaggacctccttagccgcgataccaatgtcggtctgctggccttggtggccgccgtacggctagtcgtggctccctcgacgtcagcaactcgatgggtcatggtaagaaggtaagaagccgacgcacctgcgagagcatgacgagcgcgttggggaggatcgtccggtggcccttctcgcccgctgcgaggaggagcgagcctgtcgacgaggcttgaccaatgcagaccgtgtggatcgggggcgagacgtattgcatctgacgggagcgagcagcgatcaaatcagaataaagatgtgactgccttgggtcatgtggtgcgactgaccgtgtcgtagatggcaaggacgtccgtgatcggcccgccgtagctacagagccagccgcaaggacggagctagcgtcagagccaaacgagcgagtgacggcgcatcagtgatctgagccgcgcacctgttgatgtacatctggatcggcttctcggcgtcttgcgcttcgagaaagagaagctggttggtgatgaggcttgccgaggagccatcgacctgttgcacaggcgtgcggggcgaagggcgcaggaggacgacaggccagcggggtcagcccgagcccgcggattcgagcgcgatagaggatggacggacgtctccgacaaacatgacgcgctccttgagcaggcgcgagaagaggtccatcgagcgctcgccctttgactgcggagaggaggggccagtcgaccgcggaacgtcagcgcccgctggtgggtgagagcgccggcctcaggccttgagagcagcagggagggacggaccgtcgtctcgacgacttgagggataattaggctccgagcagacgagctcgagaaggcccgcgatgagaggccagtggcggcagaggctgtagagggcaggcatcggcgtgcggaggaagaggagggtcgagcggcggcggcgcaggcgcggagggcaagcgacgaccgcgcaaagggcgccaggacgggaggcatggcaggaagggtaggcgagggtgtcaatgtcggtgcgagggctgctgtcgaggtgtcaaggtgtcgttgtcgtctcgacgtcgaggctgctgcgatggtggtcgctcggccggacgctcgttgccagggcgtcgttacgtgaccccctccgccgccagggcgccaggggcgtcggccgcagaggcggcgagcgcatgaaagccggccagcatttttcgacttcgaccccaacgaccagcatctcgcgctctctcctccgttcctcctcaagtgctgaccctcttctaggtcagtttgtctcctttctctctcatcgtcgcagttgtcgcgctgtttgggtcggacgtcgttttcacctgccctggcgcagagcgtcgttacccaatcctccgacctcgactcgtcgcacctcctcgacacccaccaccttcactacctcttctcaaagtgatgacttcaacttttatttctctccccgtcctatcgaccatgccgagacgacagaggtgggggggttcgcacctccccgcgggacccgtcgcaagacagcccaccttttggggcttgccagcctcattttgcctgattccctcctaccctcctctactctctcaacctgttctgccgtcactcccgcacatcgtactgacccccgtctctcctgctggtctcaccagatccttgactcgtgcgcatccctgcgttgttgaccttctgccttccttctgcccttcctcgacctcgtgagtaccgcctcctctgcacctaccatcccaccccctgccctctcatcttctcacctcactttcctttcaacacctcgatcctcaacaatggacgccttcaccgccatcttcacccccttcgtcgcctcgtccgccgaggtcgccgcccccgcctcggccgcccgcggcgagcgcaagagcgaccaaaacggctttttctgcatcatcgcctaaggtttcgactgtcgtacgtcctctctcttcttctctccttcgaggaaacgcctgggttcaaacaggcggctgaccctgctcgccttccctcctgctcgaatctgctgtggtccacctgctggccctcctcggaaccatcgtcgcggtcccggtcgatcgtcggtcagcgctggcgctctctagtccctcggctgtccttcatcctgtgacggtcctctcccgcagcggtcgcctgccatgatttatgccttcaaacctcgatctgccttgacgactggtcgtaagctctccatcgcctctcgcttgttcgttcgagcgccgtctactttcgtgactatgttcgttgctacgaccgacaggagtgtcatacagccgcatcgcgatcgtgcctgaccttcgcagccttcacctgacgagggcctgtcagtcgaggcggatcccgtgcacgaggagagaagccgaccgcaacaggttggcaacgggtgtacatctgatcgacaaggcgaaagggagggagcgtgggagctgcggcgtgcgctgatgtacaagagagccagactgcaatgagtgacaaggtgagagagggcaaggcaaccggcaggaggggccgcgctcttgctttttgtgttgcgcgtctcgtgatagcaacatctgcgacccaggaggcgcgtttagcccagaggattgctcgaaggcgtctagagggcagcgcgggcgagcgaggcctcgttgagctgcgtgaggacggcgacactggacagcagaatgggagtcgacaggcgcggaggtcagtcagcgaccagccaacggccaagggattcaagaaggtcatggacgcacgtcgtatcccagtcgatgcaagcgtcggtgaccgagacgaagggcttgagcgcgctcaggtcggccgggatgtcctgccggccggggttgacgttcgactcgatcatgacgccggtgatggaccggtcgccggcccggagctgggcggcgatcgcgtcgacaacctttggctggttgcggtagtccttgttcgagttgccgctgagaaagtgtagaagggaaggccggtcagtcgtcaatcgtgcgccgacgccgataggttgaagtctaggaagagaacgcactgcgagcagtcgaccatgatgcttggctcagagtccttgcgggcggcagcaagcttagcggcggcctcctgaaccgaggcggcgtcaaagttggtacccttggtgccgccacggaggatgacgtggacgtccgggttgccgttcgtgcgaacgatggcggccagacctgaagcaagagcacgacaggcctcgcttcggtcagcaacccttttttcaaagaccggtcggagacgacgagcgcaccctgcgaggtcatgccgaggaaggcgtgcgggcaggacgaggcccgcatggcgtcaacagcgacgccgaccgagccgtcggtgccgttcttgaagccgatcgggaacgagacgcccgaggcaagctcactgagggagcaaaaggcgggaaaggcaggctgcttgtcagctcgagcatacctagcaagtgaaaggagcacgaggatggaccggtggagctgcgactcggtcgtccgagcgccaatagctccccacgagacgaggtcggcgatgaactggggcctgtcggatagggaggcaatcgggctggcggtcagccacggccgcggagcgagcagacccagtgcatgcgagggacggacgagatggtgtcgagcagctcgcagccgacgggcatgccggtcgaggtgatgtcgatcagcagctggcgggcgatccggagacccttgttgatcttgaacgagttgtcgaggtcggggtcgctgtgggtcggcgaattaggagagcgcgttgtgtcagactgacgtgacttgtcaccgcgcggaaggagaggcgcgagacgcacttaatcagacccttccagccgacggtcgtgcgaggcttctacagcgtgcacagacgtcggtcgaggggagcgggtcagcgacatttcttgtaagcaggctgtctgtgctaggcggcaaccgcaggacgacgaacctcgctgttcaatgccaaaaaatagcagatatacgtcagcaatagacgctctcagcagcagcaaacagaagaagcacgcacaagtaggcgcgcatgacgacgacgaggccgggcagggtgtcggccagcgccttgagccgccgagcgtactcgagggcctccgaaggcctgcgggaatgagaaaccaaatgtcagtgccctgctgctcgcgcgagcataaccagcggcctgactgcgcaaccagcaagcgctggtggcagcagcgagcacggccggacgcacgagtggatcgagcaggggccgatgatgattaggagccgcgagtcggtccggttgatgacggcagccgactcggcacggcccttggcaatcgtcgcctcggcctccttagtgatctgtgcgtagccaggagcagagtaggcgtaagctgcctgtggcaaggacggctctactgctggtcggctggcgggcggctgcttgacaggcagacagacgcccgctcgaagcggagcagcagcagcaggcgaggctgagcaggctggacgaacggcaatctcatgcttgagcagctggggcgggacgagcgggtcgtagccggcaatgcgctgatcgtcgaggctggcagcggccatgacggtgaggcagggcagagcggcggcggcggcggtaagaggaggcagtgagggcaggggcagcgggcgggcggtgaggcgacaggcaggcaggcaggcagggtgacaggccggtcagcgagcggcctccggggtaaaagggctgtgggtcacgccggagtgggcgtggacgcactaggcggacatggtcgggcgtaggagcgaggagggtcttctagtgaggatggcggtatgcggggatggtggccttggttgtcgacctttcggcctacccgccgaaatcgccctgccgccgttgactcgcgggcggcgaggccaactgccgaacgcacttgcaagtcgccgttcctggaggccgttgccgcaacgcccctctcccttcttttccccccgactcttccttcccgaccacatctccctctcacccctcccctgtcccaacactcctctctcacccctttcaatatggctgtcaaggttggaatcaacggcttcggtcagtcccaatattttgcctgctcgtcatcgcctgctcgtgccacttcgacgcacggcctcgcgacggcctggctgactgggccacgaccgtgcggccgaccaagctgacacctcccttcccatcttcgctgcccttttcctgccctcgcctcctcttcgtcccttctcctgcgcatgatgtcctctctcaggccgtatcggacgtatcgtcctccgtaacgccctcgagcatggcgacagtgcgtccatctctcttggctcctcaccctgcttttttccttcgcgacgcttctccccagcggcgcgcgagatagcgttttgcctccctctattggacctcgtcttccagtggctgactctgcctccttccgcactcctgcagtcgacgtcgttgccatcaacgacccctttatcgacctcgagtacatggtctacatgttcaagtacgactcgacccacggtgcgtctgccctgcctcgcgctcggccggccggagccgcgcttccgtcctccgatctcgccgactgacccttcttcaacctcctgcaggcgtcttcaagggcaccgtcgaggccaaggacggcaagctcgttattgagggcaagcccgtcaccgtcttcgctgagcgggacccggccaacatccagtggggctcggctggcgccgactacgttgtcgagtcgaccggtgtcttcacctcgcaggctgccgcctcggtccacctcaagggcggtgctaagaaggtcatcatctcggccccctcggccgacgccccgatgttcgtctgtggcgtcaacctcgacgcttacaagcccgagtacaccgtcatctcgaacgcctcgtgcacgaccaactgccttgcgcccctcgccaagatcctccacgacaacttcaccagtgcgtcctcagttgccccgagctgtctctcggccttccgctgacctgctctctttgcactccgcagtcattgagggcctcatgaccaccgtccacgccaccactgccacccagaagaccgtcgacggcccgtccgccaaggactggcgtggaggccgtggcgccgccgccaacatcattccctcgtcgaccggtgccgccaaggccgtcggcaaggtcatcccctcgctcaacggcaagctcaccggcatgtcgttccgtgtcccgacctcgaacgtctcggtcgtcgacctcgtcgcccgcattgagaagcccgcttcgtacgaggccatcaagaaggtcatgaaggccgccgccgagtcgcccgagtggaagggcatcttcgcctacaccgaggacgccgtcgtctcgaccgacttcatcggcaacaccgcctcgtcgacctttgacgccgccgccggcatctcgctcaacgacaactttgtcaagctcatctcgtggtacgacaacgagtacggctactcgcgccgtgtctgcgaccttgtgtcgttcatcgccgcgtgcgtcctagtcttgcttcgctttttcagttcacgcgaatcagagctgacccttatcttctcctctcccgcagggccgacgccaaggcctaattgcgacacctcgcgccttgccttgtcttctcctacctcctcctcggtcgggcccctttgctcggtcctgcctagacatgcacccctttcccttctgcttctggaccgttcgacagtgggacttgcttgtcagatgcgtggctcaagcaggcctcggagcgcaacagtagcgcacttgtggtcgcataagcgatcactgcaggcttgttaggctcgtgagcttgcactcgcctgggccgcaatcacctaattctgagccgttcctccggttgagcggtttgctgcgcgctggttggtcgagctcccagcgcacccgcctggcgccgtctctgcacgcacttgcccgtcgcctatctggcctgcgctggcaagtactggatcctgacaaggcagctggccatcgcaagagccttcgttgcacggcaggcgtcgtgcggggtcgtgcacacgccactgccgaagcacgccgaaagagaccgaaccgccccccgccttttcctcaacttctgttgtcggccgtttccggacgccggtcggtccacggctccgaccaaggccgaccgggcggtcctattggcactctcgtgtgaagatcaaggagccggtgccggggttgatccaagttgaacatgttgtgacgcgacgatgcgtcagagcatcggcaaacactcacagccgacgcctctctgtgaagcatgggtactccgagtaagaagcttgtatggtctacacgacgtgtcttctccctgctgccgtgtgactgcagacacggacccggtcgccgtggcgtcgcaacggtcgcaaccttcttgacaaaccatgatgcacagtctttcgagatgaagacgcaaaatcttcgagtggaaacgtgcccaaggggaagcagcacgaccgactactctcatggacgattgcggaacgacagacgtctgaacgcttctcccttggaaacaggcgagtcaagcaaagtgaaagaccttgaggatggtcacgctggcctgtccggacgacagcctcgcagtgtccctgccggccttcttctcctcgacctcgctggcagtcaacgcgaggtatgcaagaggttatagagggacatgtcattgcgaggagagtaggtcgtaaaggcggagtcgcgaaagaaagatgcggtgcagacgaggtaattggttcgcgccttgcgaggagcgaaagtgaggggagagtgcagtcgagccaccgccggattttgaatcgcgcgaggccgttcggcggacgaggaacggaggatgagaagcagtcgaggtgagggctgactcaggcggccggccgtctacttgatcgtctcgagcgagtgcgagaagcgggcgacctgcgtgcgagcgaagggggagtgatgggtcagtgacaacgaggagtttcgcaggaaagaagagagtcgcaccttcgggtggcacatgacctggggatgagaagagctcgatcagcgacgtcgttagggcggcgcaagccggaaagacggaccttagcggcatcaaagttgaggacctggagcgactcgagactggtcgctcgcgacagggcgacgtaggcctggcctttctgtagagcggcagacgagacatatatatggggggtcagcaacgctgcccggagctgagagtgcgttgcgtagctggacgaacctcgaagatccggcgcaggtcgcacttgacgcgctcaagagctgaaaaggaggggcacgcaaggtcagtgatgagccatgagccgggtgagggatgtagagcgtagacagactctggccctgggccttgtggatgctcatcgcccaggcgactggaagggcgcgaacagcagcaagtggtcagcgtcgtcccgaacgaaaggccgagaccaatggccgacgcacgaatgagagggagctgtggacagatagctttctgtcagcccatggcgcaaggcagagcagcgctcactttagacgcacctgctcgcgctggcacttcatctcgccgtcgggcccgtcaatcttgaagacatcgcgccggacgagccggatgatgcgcgtgccggacgacgtgtggaactcgacgaccgggtaggccgtctcgtcgcggtcgctgccgacattcttgcccttctgtgagcccgaatcggtgtcctctgacgagaagcggacgccctcaccgtactcgccgctctcgatcatcgccttatgctgcttctgcgtgcggaagccgagcaccttgcctactgagccgttgacgaggtcgtcgtcgtagttctgcgcagcgagggtaggcggccggtcagtgtcgccccgcagctcggaccgatcagctcggcgtcgcaccttgagcagcatgacctgggcatcctccttgagctcgagccgcggctcggcgagcatgttgttgagctccttctggagctgctcggggttaccgcgccagctcggaccggtcgagtcctcggccttgaagtggtgcgggtcgccccggagctggacgagccgacgcatgttcgattgcgacacgtcctgtctcagcggccagagctcggtcggcgcaagcccgtccgagtagacgacctcgcggtcgagcttcttgaactcgcggaccgaggccaccgagagctggccaaaccgcatttcgttcagcatgtcgaccatcttctggtccttctgccgaaagacctgggagaggttgaccgtgcgcgagatcgtctccttccagagctgcgcctcaaaggcaaacttgacactgtcgttcttggcgaccggaggcagctggaaaaagtcgccgcagatgacaacctagcgagagtagcgctttggggggtcagtcgcaggtcgacatcgcgagccgaagcagagagctcgcacctggagtccaccaaatggcgccgggttgcgacgcagcacctggccaatcttgccgagcttgtcaaagagctcgccgtcgaccatcgagactgaaatagcacgctgtcgtcagtcagggctgcaggctgggcaaagctcgagagagcgacgcaccctcgtcgatgatgagcgccttggtccgcgtccagcgctgcagcgcctgctggtttttgcggatccgctggacactgcaagggagggttgcatgcgcgagggaatcagcgacgatggcagatcggggctcggccgacagcaggcacacgcacagcttctcgaccggctcgatgccgatgccgatgccggcccacgagtgcagggttgtcccgccgacatggcaagcggcaatgccggtcgcggccgtgacggcgaccgcctcgggtcggatcttccacttttgcttgagctggacgatgatctcgcgcagcaggaccgacttgccagtgcctgagtcgcgcatacacctcgggtcagtcgccggcatctcgacggcgcagaacaggaagacgcaccggccgagccggtaaagaaaatgttgaggcccttgacgacaaccatgtcgagcaccttcttctgctcgtccgagaggacgatcttgcccttcttcatctttggcgggtcgaccgtcatgagtggcttgacgttggccgaggtcgagctctcgaccttgggcacaactgcggcgatctttttgcgcctgtgacgagagggcggcgatgacgaagaaagggtcagcacgcggcggaaaggcactcacgccgacgcgtgcgcgcgcgcgcgctcgagcccagacgagtcgaaacgctgctgcggagacgaaggaggaaggcagacgtacggcgcgctggctcccatcagatcgacccaggtgtcgctcgagtcgcgctccttgttctggagcgaggccgacgagaccgtcggcgcaggctcggccgcaccctggagcttctggtacgagaggacagcgagccggcgccggctgcggggcgagaggggcgccggtgctggctcgcgcgggtcggtgaaagacgacgacttgtctaacagccgggacttcttgaccggtggcctgcgagtgacgagcaggcggcaggggtcagccgtctggctttcaggtaggagctggagggagcggcaagcaagccttagaagctcgtgcgagcgctcgagcctcgttccgaggtgggagagcgtgcgggtggagctgaggcagaggggtcgaacgcactctgctctccagctcggctcgccgtcgtggtcgagctcaatgacgtccgattcggcgcgtcccttgcccttcttggcatcgctgctgccactcgagccggcgagcgtcgaggacgacgaggtcgctgccgagccgctcgccgctccggaggcggccctggatgaggatgccgcgccagcggacgagttcgaggacgaccagtcgcgcttgatggacgagagcatgctgcgcgcgtgttttgaggagctgggtgcgagatcgccgcttgcacgaacgagctgcaggtcgagggtagggggtcggtcggtgcgaggtgcggttcaggaggggcgaagcccggcgcgcgcgtcgtcgtcaaggggggagagtattacgccctctgtaaggctcgagttacgcaggaatttgggcaacgcacgcgccggcgggccaggcagcagagcagagctcctcctcgtcgagccggctgcctctcctctcaacaccttcatccccccgcctcgccatgtctgcccctgctgagattgagcccaagaccgagaccatggacgtcgacgccgtcaagctcgaggcaaccccagccgtcgcgtcgtcgtcgacggccgccgccgccggccccctcacgatcgctcctgaggacgctgccgaagccgccgaggtcctcgcccgtggtacgtctcctgcttgccgaggaatacggtagctaccctcgccctcatgcggcgcggctgctgccgtctcaaggcgctgacatgtgtcagctctggtgctgacggttggaccttgcttcgcctcccctcctgctcctcacccgcgctcctccgtctgtcggccgtccccgcgacctcgctccccttgcagtcgagttctacttcaacgactcgaacctgccttacgacaagttcctctggacgacgcagggccttccgaccggccagggctgggtctctatcgcgctcgttgcctcgttcaagcggatgcgcgaccaccttcaccgcggcattccctggattgccgaggcgctccgcaagagcgacggcctgctcgaggtcgacgagaagggcgagaaggtccgccgggcaaaggagctcaagcccccgacggatgccttcggccggtcggcttacgtcgtgcgttgctcgtgtggtttgacacctgacgagggtgcgagggctgaccgcttccgcgctgctgctcctctcggatccgagcagaagggcttcccggacgacagccctgagctccaggcgcagatggaggcctggttcggccagtacggcaaggtcaacgccgtccgcaagcgcatgaccgaggccaaggtgttcaaggtgcgttcgccaccggttgacgctggctgctggcctagctgaccatcgctccccgcttcccctgcagaactccgtctttgccgagtttgccaccatggaggacctcgaggccttcctcgcgctggatacaaagcccaagtttggcgagaccgagatggtcaccatgtcgaagtacgtccggcgtagctggtcacgggctaagctgagcgccttcccgctgacgcctcattcgctcctcctctcgcagggacgcctacgtcacgatgaagatgattgagaagggcatcgacccgtcgaccaaggctcgcggcggcggcggtggtcccgtcggcggcaagttcaacgccttcaagctgaacgcggattcggcctcggccggctcgaagcgccgccgcggcgacgatgacgagggtgccaagggcaagaagccgaagctcgcggtcgagatcgagtacctcggccagaagctcaaggtcaacgactcgacgagccagctcgagaacccggaacagctcgtcgtcccagccggccacgtcctccgcttcaccggctttggtccccgtgaggagggcgattggcgcaagcttaaggtccttccgactgcgtcggctagtcaggcgcactaccactgacactctcctcctccgcccatccccttccgcaggagacgctcgtcggccttggctaccaggctcccttcatggcgatccccaaggacgccaccgccggctcgttcgagcactctgccgcgcctttcacgcccgagtcggtcgccgagctcaacgccaagaagctcgagatgaacggtcagccgctgacgtttgagattgttgagggcgacgacctccggacgcactacctctcgcgggccaacttccaggctaagcgcgcggtcgaggacgccaagtcaaagggcacgtcgtcctcgggcggccggggtggaggccggggtggtcgtggcggtcgtggcggaggaggtcgcggtggaggccgcggtggtcgtggcggcaacaacaacggcggccggggcggcaagaaggaggacggcgccgacaagatggacacggatgccaagccgcctgcggccgaggaggcgaagccccgggtgcgtcctctcagcccgtcctgagagcatcagcgcctccccttgctgaccgtccctctcctttgcaggccatcgacaaggacgcgcctgccggtgagggcgtccgtggccggacctcggcgccgacgatcgcctcgaccgagtaaggcagccccggtcgttcccagcagtgtcgagcgagaccggacgatttgcccactgctctctttctttctcgttgatctcttatgagccccgtcccttatgacctccgcgcaacgtcgtcgcccgcgccgcagggaggaggcgcgctgaagaaacgtgactgcgagcgccaccaaagaccgcaagggaaaggggccggacttttggctcctcttctgcgcgcagcaggccggtctcgcgggcaaacaaggcggcgcggcgggcgggcacttcaccgtcgcgctcgtttcccttctgctccctcccaacctccttctccctcctcctctccttcatcctctctcgcccggcctcaagctcccttgtgcgtgtgccgctcgctcgccgtctcgacgcgagttcagctctctgacggccttcgtttgcagcaagcctccagtagacccgactcgctcgacgcgaccgtccttcacttcgcccgcctcctctcccctctccgccctcccgactctttttcctctccgctgccatgctcgttccctcgctcgcctcgctcgctctcctctcctcggccgtcgtcgtctcggcctcgtcccaccgcgccggtcgcttccctcacaagaaggctgccgacagcctcgccaagcgtcgcgacggcggctcgaacgctcggtccgtccccctctccctctctctctctcctctcagactgaccgaacgagaagctgacgctcgcttgacgacgcatctccagggccacctggtacgattcctcggtcggccccggcgcctgtggcatcgtccgtgcgtttttttctccctctcgcttccctttgaggcctcccgcgggcgggcggacacgccgcgagcgagcaaggacgcgcggccggcgaagaaagcacgcgcgtctccgccatcgccctcctcttttctcctcttcttggcgccccgaccaacagcccgctgacccatctctctctctccaacgacaacagaccagaacaacgagtttgtgagtcgcgtctcttgccgctgcttccgtcgcccacggtcgctgacgccgccccctctcgcttccgccccgtcgcagacggtcgccctcaactctgcccagctccgcgagtggggaggaggctacccgtcgcctgcctgcggccagaccatcacgatccagtacaccgactcgaatggaaagacgtcgacccagcaggcctccatccaggttagcgcgtcgtccccctttgtggatagccaaggtgacgctgactggctcatctcatgcccgcgtttcgcaggacgagtgcccgtcgtgcccctacggcggcctcgacctttcgcagggtctcttcactgccttcgcgtctgagagcgttggcgtcctctcgatcaactggtggtacggcggcggaggcggctcgcccgctcccgcccccaaccctgagccgacgacgtccgaggcgcctgctcctgctccgacatcagagacgcccgccccggaggcgacgtcgacctcgtcggccgaggaggccacttggacgcctgctagctcgtcggccgaggccgccgccccgtccgcatctgcggccgacttcaaccttgccgtccaggccgaggccgagccttcgtcgtcgtcgtcgtccacgtccgctgaggctgccccgacttcgatctctgtcgccgcccccgctgagacctgggtctccccgacgacctcatcgaccgccgagtgggtcgcccccgtgacgtcgtcggccgaagcatgggtcgccccgaccccgacggctgccgcctggtcggcccctgccccctccgcctcggccactcccgagcctgtccttgacggccagacgctctgccccttgttcgtcactccttcccgcgtcccttgctcgaccacttgcatcgccgctgactcccctttccttcctcacagcacgccccagtttgtcgtgctcgctaaggaggtcgtcctctacaacggcactgttctctcgttcctcaacgagtcgctcgccgcggccgccaacgcgagcctcttcaatgcgacctcgccttacgacctggccgactacctctgctacaacgcgacccttttttcggtcgacctttacgaggcctcgaccgccaatgcgacgctcgcctcaatcgccgccaacgtcaccgtccccgtgacgtttggcctgttcaagacgaacgcgaccgtcgtcaactttgcccggacggcggcctcggccaacgtgacggtcggcccggcggccaacgcgaccttcctcctcggcaccaacgttacgctcgcctcgtttgagtccttcgtcgccgcgaccgccaacacgacgacggccgagctcctcgacgccgcctcgtctggcgccgacgactcgacgagccacggcctcgtcgaaattttcgacatgctcgccgcctcgcgctcggccgcgaccgccgagtgcctcgagcagtcgatcgtcgatcagattgagcgcgccgaggagcccgtctacgaggacgacgactcgctgccctggtgcgacgacgaggacgatgagtactaaagctcggttgccttcttttgcttctccttccttttccactctcacgacccagagctacccacctttgacaggcccccgctctactttaaaagcaactttcccctgacacgtacccctctccctctccttcacggccccgcacgacccttcttcctgtttcccgccctttagatcgccccttctcttgcttctcttctcgcggctgctcgatgagccggcgtcgatcgtcgtctcgtcgagccttgccttctcccctcgtcacgctgtagcacgccttggtccgtcccctttcttcccccctcccaccatgctggcttggcatctcgacacatccatgaagactggctcttcctaatatagaaggtaagcatcgatacaaggggaaagcagagggtagaagggtcgcgccgacttcaagtcgttggaagagtggattgtcgacttgtgctacgcgtcatcagagccgccggggtggtcgtcggtcgggtcggacgtcgggaaatttgcgccttgcagcgtcgtcttgctgtactcctgcaagcgacagtcaatgcgtgagaatgtcagcttgcttgacggcgctagagccgagactgcgcgacgcaccttgccgacgacacctccgcgcaggttctcggcattgctgtcgccgagagcgggctctgtaaactctgactctaaagagctcgacgacacgtccgacgcgcgctgtgcgccgctgctgccgctcttctcgccgccgcccgggtggtcgtccgtcgtgctcgaggtagggaaatgagcaccctggagagtcgtctcgctatactcctgcgggcaagagcacatcgcataacaaacgccgaagtcagcgcaccactatcatcccgaaagcccccataaacagaacgtaccttgccaacgacgccgcccttgaggttctcggcgttgctgtctccgagagccggctcggcgaaccagggtcggctgccggtgctctcgtcgtcggaggccgcgggtgcaggcacggacgacgtgttgtcgtaggcgggctcgacggtcgagccggtcgggaacgccttcgacgcatctggcttgtcggaagcagcgccgggcgttgatggctggtcgttggcgagggtcgggttgctgcggggcagggccgatgagcgtcagtcggggccgatcgcggcaagcagagctctcgacgagctcgccgcagacggtacgacgcacgacatgattgatgaattctggtactctgctttgcttactgtcgagtcgaaaagatgatcgttagaggagtcaggcgatggcgatggcagccgaatgaggagcgtcatctgggggctgaatgcatcgaagcagggccgtatacggttcggcagggccagcgcactcagccgcgagagcgcgacctccgacctcggcgagctcgccactctccttctccttcacaaacgtcgcccggcctcagcatctgccctcatccgcgcctcgctcagcatctcagatcgcaagcaccagaccgcccctcccgcttgaccgactcccgccgcgtcccttccggatggcctcgccccagccgacgccggcgcccgcgctgcccgagctcgagggcctcctccggctgtcgtccaagcggacgcactcgctctacctcgcgtcgtcgtcgttctcgctcccggccgacccggtctcgacggcggccggccagcgctccaagattgtcgacgaatatcgcgacagcgttgttctcccgccttcccttgctggagccggcgccaagcgggcaaaggtcgagaacggcccggccaaggctggccggctcatgctcgaaggcggtagcgcgacgacgaacggccgggcggctgaggccgctccgagccaggagctcgttagctaccggcatagccaaggcctgaacgctgagggaggcgccaatcagtcgcggctgagcaaggagctcatgcgccgcaaggaggcgcgggaggtcgtgcccgagtatcacccgcagtgtgcgtctcgctctgatccgttcgaggctcgccggtcactgcatcgctagcagtcgggcgcggacgcgttcgcagtcctcgacgtcgtgtcgagttaccagcggacgggcgcgttgaacgcggcatgcgcaggccatcttgtagacgcgcttgtcctctgtctcaagctgaccctttgcttcctccacacccctcatctgcttcagggaagctcacgcgtgtcatctcgggccacctcggctggatccggtccgtcgccgtcgagccggggaaccagtggttcgcaaccggcgccggcgaccgggtcatcaaggtctgggatctggcctcgggcgagctcaaagtctcgctcaccggccacatctcgaccgtccggggtctcgccgtcagcccgaggcacccttacctcttttcggccggcgaggataaggtgcgctgggtgcgaggcgtgatcggcgctcggcttaacgctgattgtcctgctggctgcttcgcggcgtttgctcttctctcgtgcagatggtcaagtgctgggacctcgagaccaacaaggtcatccggcagtaccacggccacctgtcgggcatctatgcgctcgagtgcgtccctttgcctgtcggctttgctctggcgcgcgagcgcgtcgctgaccgccaaccttgcggcctacttccagccttcacccgacgctcgacgtcctcgtcactggcggtcgggacgcgaccgcccgggtatgggacatgcggaccaaggcgcagatccatgccctgaccggccacacgggcacgattgccgacatcaagtgccaggagtctgacccgcaggtgatcacgggctcgatggactcgaccatccggctttgggacctcgccgccggcaagacgatgacgacgctcacgcaccacaaaaagagcgtccgagcgctcgcggttcacccgatagaatactcatttgcgagcggctcggccggcggcaacaagtgaggccgctcattctctgcttgtctctcccgacgcgttctctgacccctcttccctcgcagcataaaaaaatggaagtgtccggaggggacgtttgtgcacaacttttccggccacgacgccatcatcaacacgatgtgcgtcaacgaggacggcgtgctgttctcgggaggttcgttttaccgctctgctgctccatgttgcgcgcgagagtccgctgaccatctgcccctttgcgcacccctccttgcagccgacaacggctcgatcacgctctgggactacgcgaccggcaagccgttccagcacatcaaagacattccgcacccgggctcgctcgacgccgagagcggcgtttttgtcagcacattcgacaagacgggcacgcggctcattaccggcggcgccgacaagacgattaaggtaagcctcgacccgcctctgagacgcgcgcgcgcgtcgcctatccacggaactgctctcgctgacaacggatgctcttcctttaccctcagatctattcggagcaggcctgagtgtgctcggccgcgcaaggggtgcgggggtcggtcacggggtgcggctccgggttcgacctggacggggccgcggctgggcatgctcgctcatcatccgtccttctatcatgctttgtacttgaccgtcacgtcacttgtcaggaggaggggagcactgtcaactcgctgccggctcaagactcgtccgcgccgtcgctgtcgtccgcgcgcgctgtgcctcgaccgtcaacaccgacttgccttcatcttcaagcggcactccgcccctccctcgcttggcgacgactctctcttcgctgctggcttgaccaggtccgaccgccccttgcatggcccttgcatcctcgagccggaccgccgcgcctcaagctgtccgagcacgacctctcgacgaccgggagccagcagcgcatggcctcaaccttctcgacctgggccctctgattgaccccggccgagcatggtgtctcgctcgaacagcctcttcggctagcgcgtccgctgctgatgtagtagccgaagagctcggtggcagcggagacaccctgctcgagctcatgcggcagacgctcgctccaatggcttccgaccatccgagctcgggagtggcgacgaacagctcggctagcagcccacagtcgacatcgctctcggtcgtgaacgggccggccgaacggctaacctgggacggcaacggtgccgcctggacgagaggcgccgagctcgtgcgctcgttcgtcttcgagccggaggagcgcgtcgcagcggccgcgttcgcctcgttctcgccgcagtgccagccagcagatcatctcggccgtctggcaggctccgtgaaggaaccaactccatcggagcggcctgttccttctcctcagcctgctgccccagtgaggtctcggccaagccaggtccgcaggtcgagccatgcccgagggccgcgtctctctgaaggcgcatccttcgttcgacagccagccgactcgtccgcctttctctcggcaccaagatcatcgactctgctcccttcagcctcggacgcttcgcacaacagcggcagcacgtcaccggcctcggagctgcggcgcttgacaagcgacccgcaaatgcgcgcgctgtgctttctcttcggcgactctctgcacctctatctcgcctcgggtgcgaggcatatcctgtgcttaccctgcccgatggaatcgtggctccaagctatcgaatgcggtgggtgcgccctgcgctctcgtcggccagcctcggacgtcacctctggcaaaggcggcagcctctacgtcgtgcggcatccgcttgacggcatcgtcctcgtcaactctgacgacgaagactctatcttctccgccgaattggcggtaccagtagctggcgggtcgctacccggctgttcatcggatgaggtcgcggtcgagcttcagctgaactccgagcacctcgcagcgcacgcgtcgcagacgaccgtccgcatcccaatcgactcggcgatcgctcggccggcgatccctgcccttttcgggtctgacgtcgagatcctcgaccgtcaggcaagggtccctggcaacgatcgcttggacctgctcatccgtgattgccttcaagccctcaacggcgtcttgcccgcaaggacactgtctgctctccggctcgacctcatccggtctgccgatcacgaacgcgcatcaagcgacatgccggcccgctttgcctccttctcgtcggcgctactcgatgtccttgcaagcgaccagtcgaagacggcgccggactctgcctttggcctctcgccttgggagcggatcgcacgcctaaatgggctctctcgcgatcctgccctccaaacgctggcgcccctgcctctctcaaccgcattggcgaccagcaacctcaactctacctctactgcagatgcggcgcagacggcctcgatcgtgctcgcgctgcacctgctggcagaagaaatccggctcgacatactccgtttccaagacctgcgcactctcggtgggctcgtcgcacaactgagcctcaccatcggcaggttcgactgggcagactactggttccggcagggctgcccagcaccctccgaggttacgcacgtcggtcacgttggtgagccttagacgcatcggagccgaagacgatctgaacaggcgactgacatctttcgctctgccagtcgacacctcgctcccgtcgcctccagacatttacgctcatctccgggccgtgctcagcggttgctcgtcatcctggccgtcggttgcatctataccgcgctcgccgccttcgctcagctcaaccctgatcgatctctacgagatcctgcgcaccgtctcacccgactcggccgctgaccgctcggccgaagccatcaacctcatggccgaccgcggtctgaccaaggagcgtctgctgcggatcccatttgggctcgccctccctctgatggccgctgtcaagacgtgccagtcggcgcctgtcgcatcttggtcaccagcggtcgcaaagctcatccggcggccggacctcggtcggccatcctacacggcagcgcccgcgcccagagccttggtgcgtctcggtgccagcattttcatgcttgggatccaggcgcaacgctgactcgcagatccacctcttttgccaggtctcaaagctgatctcgacgcggtcgctgagccggccgtcgaaaaagtcggtctcaggcctgccagccgagtccatccttgactttcgtttcgacaaggatcggcggctggaggaggtcgagcgcctgctttctacgacgcgagtctcgaccttcaagctacgagacgagggtggcaaatcgtgcgtggcccagagcaaggcagacagagcctgaccgaagttgacaattccctttacccgcccttctcgcagggaggaagagatcaccgcccagcagaaggcgcaggctagcatgctggttgcccggacgctggcgctgcccgtcggccaagggatgttcacgtacgcaacctcgactgccgtcggcacctgcgcactagtgatccgaccgatcgagacggcggtcaggacggtccgcgggggcggcatccaagccgtcgccttgccctcactcgaacccgagacgacgacgtggcccgactttgctaacggcgttgcgcaagcgcttcagatccgagccgactcgaccggtattgacagctcgtggatcgtctacaacaagccgcgcaacctaacggcctcgcacggcggcttcctcctcggccttggcctgactggccaccttagcacaatgatgctgtaccacacctacccctatatggacgcccggcacgagacgacgtcggtcggcctcttgctcggcctcgccgcctcgaatctggcctcgcgcgacccgaccctgaccaaagtcatggcgctgcacgtccatgcgctgctgcctcacggctcgcgtgagctgcactcgacgccgctcgtccaggctgcagcgctcggcggcatcggcctcctctacctcgggtcgggcgaacggcgaatggccgaggtcgccctctccgaaatcgcgcgtcaagggtcggatgaggatgcgccgacagaggcgcaggcgtacgcctttgccgccgcgatggcctttggcatggtcatgctcggtcgtgggggagagaccacacgatcaggcgaccctcttcttgtctcgcgcctgcgggcctccattgacggccgaacggcggcgagcgaggacggtcggagcggtctcgctcaaggaccgacctcgtcgaggcctgtcaagcccgaccttaatgtgacctcggcgcctgcgacgcttgcgctcggtctgatgtatctccgcaccggccgccaggagatcgcggctattctcgagatcccccagtctgccagcgatctccagctcgttcggcccgatttgctctttgtgcggacgctcggtcgcagtctcatcctgtgggaggagatcgccgacagcgagacctggatcgactccaacctccctgccttcctccgcacgtcgctcggcaagcgacagcgggacgggtcgagtgttggcgctcagcagacgctcgatctcgcccgcttcaacattctggcgggcgcttgctttgcgctcgccctcaagtatgccggcactgcgcgctcgtcagtccactcgctcctgctctccacctacgacgtcttttacgcgcgtgcgaccgtcaacggtgcgtctccatccgctggcctcagccgtctgcagtgccgctgacgtcgatcagtcgtctcctttagcctcgaccttccagcagcgcatccggctgaatgccgcccggtcgtgtctctgcgtcattgcgctctcgctcgccatcgtcatggccggcacgggcgagctttcggtcctctcgcgcctgcgccttgctcacggccagcacgagcgtttcggctacggcgtccagcaggcggtgcacatgtcgctcgggctgctctttctcggcaagggcctcgcgaccgtcggtaactcgtcgacggccgtcgcagcgatggtctgcgccttttacccgagcttcagcatcggcccgggcgacaacgtgtccttcccgcaggcgttccgccacctctgggcgctcgccgtcgagccacgctacctgtttgcgcgcgacgtcgaaagccgagagcccgtctacctcccgatcaaagtcaagacaagggagaagaatgccgccggctcacattcgctcatgtcgccaacactcttgccgccgctggaccggctcatctcgatctcgatcgacagcaagcggtactggccgctcaagattgacctgcggcagacgaccggccggtcgccagtcgtccttgaccagcaccggccgctcgagggcatcctcgtcaaacgtcgcttgggttacctcagctacgcagacgatcacaagggcaaccggaccattctggccaaggccggcctgtcgaccggcgtgatgacaggtctgccagacctcggctcaatgtcggtcgcgcccatcgcccgggaaggtctcgccggcctccgccagtcggtcgcggcgtacacgtcggacccatttctgctggccttcgttcggcgcctgtgcgcgccgagctcgtcggcaccagggccgtcgcaggacctgcagcagttctgcgagagcgtcttgctcgagtgtctcgtcaacgaccagccgcacctgatcgcactctacctgcacgtccggcacgtcggtcgtcggtcgactgctgcgccacacctgctgccggccgttcaaatgcagaacctccaactcgcgctcgactactcggacggctgggcagccggctcatcgatcaacaacggacagcagtcgacgacgctccttcgacggtcattcctccgcgagacgactgaggccatgacggcggctttcttgccgagcctcaacggcggattgcgcgagcacctccaccgatacctcggcgacgtcggtagtctgccggcggccgcgacgccacgcgatgagcttgcgctgtacctgacctcggccggggtcccgccgctgccggtccttgctggcctccggaccgtcgtcctcgaagcccgtgcccatctcggcggccaagcgggcgtcggtggccaagagcaggacgccgtgctgcggctgacggtcaaggcgacgctcggccggctgcgggatgccgaccacacgaagaagtcgtgccagccgggcgaaagcgacctcggttgggtcgacgctgcccttgacgtctggcgatgatagcatgcctccttctttgtttgaccgcctgcgtggacaggcaagcgagtcccgataccaacccagcagccgcgagctgggccttcagaagcaagaggaaggggctgtgagggcgagaaggatattcccgctggccaggcccgccccgctcaacgagcgaggacaagccgaggcggcagagggaaagcgatcagacgttccccaacgccccgatctcgcccgtcggcccctcgcaagcgagaggcgtcggggtccgatccacttcatcgacggccccagtcccgagaaacagggaatccgcatgtcctccgtgaaggggcgtgggtggagcatcatcgtctcgcttgaagttgtgtggctagtgtaaactagcaagaccagttatctctctatagaaatgaatcctgcagagctggagagggcggaagaaggtcaaggtcagccaaggcagttctagagtgcagaataagggggggccggaggggacgaactgtggtcaatgaagttcaacaggccctgtgcgggcggcgagctctataaggggctggcggccgcgggcgaaattccgctgctgtggcgtcgaccgagagcaccgcccgcggcgggagcagcagcggcgcagtcgcctcgagctctctcggccggccgatgccgggtgccagagtgatacaagagacccggcagcgcagttgatgagctgctttctggagcattctgctgcagcctgtgctctcgtcaggctgggccttcgacaagtaaagcgagcgcccccggcagcctgcgggcaggcgtcctgtcgtctgcggcccggcgtggcaggacaggccgcgggcagggcgcgcagtcctgctcggcacggcagtagcgggcagcaccccggccggcaagcgccgacccaggggcccgacggcctctcaagggacgaacgagcagggacgagcagggggctatctgcctctcaacgacgacctctgcgagcatcacttcctcagcccgacagtccgacgccatgcctgccgctgtgcttccttcagcagcgaccgccgccgccgcagcacagccgtcgtggccgccgtcgcctacacgaccgacctcgcacggcacgctcgacgactcctgcgcagcgaccctgaccgacgccgggacgacacccaggtctggcatcgccggtctcgcagacgaaaagatggccggcgagcccatcgtcgtcagcttcgagacgccaggcctggagcggctgaatccgagggtccgtcctgcgtgcgatgtcgccgttcctgcctctcctagctgactgacgaagggctctccctcaccttcgatcgctacagagctggtcgcatggccgtcggtgcgtctacgatcttggctgcagcggatagacgacaactgacgctgactgaccggctgctcgcggaccagcgtcttgatcgcagcccaggcctctgtccaaatgttcgctggtttgtcaagtcgctcaattagtctttcgggtcaacttgctcaaactgacgactatctcattctcgcccagtcactttcggcacgagcatctatgtggcctcctatccgggcttgcggcgagagtttgacgtctcgaccgaactcgcgacggctggcctgtcgacctttaccctcgccctcggcgtcggctcgctcttctgggcgcccctctcggagacggccggtcggaagcccgtcctcctctcgtcgttgacactctacattctctttggactcggacccgtcctcggtaacaacattgcgaccctcgtcattacccggtgcggccgcgcacgccgtctcgccttctgccgacccgaaatgcaactgactaaagtcccgtcgccctcctcccacaaggttcctgatgggtttctgtggagcgtccatcatgagcaacagccccggcatgctcaacgacctctacgacaagcacgagatcggcctcgcgatgtgcgctgcagtcgagcctgcctcgcgcccccttcgcaagagctgacgcggactggcgaccctatcaggagctgcaattcggtttcacccttcctgggtcccgtccttggtcctctcattggttcgtcgacgacttgccatacgcgaggcaggctgctgaccttcctgtcccgcgcaggtggctacgtctcgatgtacgccggcgaccagtcctggcgctgggtcaacagcatcccttggtgcgacgctcctctactgatcgacacgacgcgccctcactgacccgcgccttctccacccgcagcatgctcgccgctgtcgtcgttctcgtcgcagttctcaccgtcccggagacgtacccaggcgtcatcctacagcgggcggcgcggcggctggagaaggagactggtcgggcacacgtctccatctacgaccacggacagccgaagaagacggcgctcggggctctcgcagtcggtcttcggcgaccgtttgtctttctcgtgcgtcactcgctgctctctgatcacttggcctgagactgatgcaccgtctcgcagttcctcgagccgattgtcctcctcctctcgatctacacctccctggtctttggcgtcctctacctgttcttcgcgggcctccccatcagtgagtcgcctgccaacgctcctgacgcgcgcgcagttgctgacgacgacgcgactccagtctaccaggaggagcgaggctggtcccagggtgtcggcgccctgccattcttggccatggcggtcgggctctttctcggcgtgccactgtcactctacacgactggtctctaccgcaaagcagcggcccgctcgaccgacggccgggctgcgcccgaagagcgtctttactttgcaatggtgcggccgtcaagcggcgacctctcgcccgctttccactgacccttcaacctcgtctcctcattgtagctcgcggccatcctcctcgtcgtttcgctcctctggcttgctttcaccgtcccggtagacataccctggccggcgtcggtcgtcgcgcttctcccattcggcctcggcctcatcggcatgatgacgtcgatcatgagctacctcggcgacgtctactcgatctacagcgccagtgtttttgcggccaacagccttctgcgctacattttcggcgccgtcttccccttattcggatcggttcgtctcgctgagcagcacatatggtcggaaattacgcgcgctgaccagctcttgatgcctcatagatcatgttccacagcctcacgcctcgctgggcgctcttcctccttgcgatgatctgcctcctgctggcaccgatgcccttcctcttcttcgtgcgtccttcgacctcatccctctttccaaggcccgccggctgactgccctcgtccggccggtcttgcagcgctacggggcgcacatccgctccttctcaaagcacgtgccacagacgatcgtcccgcttcctctgacggccaagccgagcgtcgaggacgacctcgatcggcaagtgagcgagccggccctctttctcacgcagggcgaccgggcggtgcgcgtcgaggagctccaggaaggcatctcgccgccggcagggcaggagcgcgacctggcgcggctatagaatggcgttcctcgctctcttcctcatgccctgccgcccccatgttgtcgtctaaaggcaggcgacagagggtggctgcccatcgctaagtgccgcgtcggtctttcaggccaagttcgatcgccttttgcccgcgtcactcggccgagcgaccccggagaggcgccggccccgccttcgctcctccctccttctcctcactcctcacctctgcctttcaggcggcgggccaagcaaccggctgctggccatggccgtcggtggagggggggcggacgttggaagccatttccggcggcacaggtttcgtctttcgtcgaagatgccgacggctccgctcgacctgccttgcccccttgcctgtcgaccgctcgactgcctctttgcctcgcacgcctactaccaccactacctgctcgccgttttcgacaaggaggctcgcccagctcgacggcccgtccaatccatcagcagtcggccctacttgcccctttccctctccgccgcagaccttgccgccgtcgatccttccggcaacagtccgcccgaccccataatcgcttcagccctaatcccgcctcctatcgacgccggcggacgagaaggcgagttccgagctcggcaagactcgccgtcaccgcatgcttgcttggctctaaagccgtcggcagtcgagaaccttacctgagcgcgctctgctgacacgcagccgcttctcaacagtcctgctcgcccctctacttggccgtccctcgaccgccaccttctccctgtagtcgacaccacagcgtacgcttgcttttccagtgagcccggctcgcagcctgcgtgcttccgacctgacccacccgtgttctctgcagctctccgacagctcgcccttccgccgcagtcaatgtcggacgagattgccctgccgccgcccgccacccagcgctcgcggtcgacgacgacccgggccagctccccacatcagcccggcaggcaaccatctctccgacggccggccaacgaccgtcagggctcgaccgcgacgcgtctcgccaacaccctgcgctcggtgacgcccgacacaaacggctcgcacgtgtcgctccgcagccggttcgtcgcctcgctgcactcaacccggagcgacgaggagctcgactcggccggtgacgatgatgaactgactgagagcgagcttgacacggacgacaatgagcgcgtcgccggcctgacgtcgctcgttcagaacctatcggcggcctcgggctcgtccatgaaccaggacgagcttgaggagaaggtccggcgccgcgttcgccagcagaagcgccaggcacgagcgaacgccaagcgggctcgcaaagagggcgcttcctcggacgaccaggccggccggtcgtccagcggcgagccatcgaggacccgcagcaggcgacggaaacgggacgaggctcccgacgggccctcgttgccgaccgtcccagagacggaccggcgcagtcgacctccgagccggccctcgtccagcaaacgccgaatctcgccacctccgaccaaccgcagccagccgtcgtcggtgcggcgagagacggcgagggccaagcggtcggacgacgctgctcgcgaacggcatgagaaggctcgcgacccagagacgggcgactacaaggacgcacacccgcgcgaccgctatgcccgcttcgaccagaacctcaacgagcccttcctgccgccgaccgacgaggagaagcacaacctcggcacgcgcttcctcgcgcccgtctggaacaagctgaccggctacgagcgggcctcggccgtcggcatgaacgcctcgacgcctggcacgggctcgctcgccgacaaccgcaactcgatgagcgccatcaccgccctcatcacgacgaccggcaacattgtcggcgtcgcgagccccattctcggcacagttggcccggcctgggaaggccaggacaccagcaacggacacgggcatcggcgtctcgctcgctacggtcggcgcgaggcggtcgacgatttggaggcgcaacaggcgctcgagattcagtacaagcagaatcgcgcaattgaacgacgcgaggagcgagccgagcgtcggacggcccaccggaaggtacggcatgacgagaaagcggcggcggcggcagcctcggcccgctcttcggacgatgcaactcgagtttcgccctcgtcgaaagccggttcgtcgcaggaccaccgttctgctcagatcgatgaaggcggaaacggggtcgacgatgaccgggacgatgaggccaatcacgaggacgagatgtctgaggagctggcccaggtcgatgccgacgaggtcgtcaagcgcgagggcgacggctcagacgtcaaggagggtgccgacaaggtgccgccgccgcacgagacgacgatccctgacgtcgacgacggtagcgacgacagcggctcgtcgaccgacggcgtctcggacgacacgtcggacggcgtggccgacctcgaaaagggccaaggccaaggcacccggtcaaacgagtacgccggctggattggaagcaagcgcggcgagcggcagcagcaggagatcttcatgtgagtctgaatgcgagggccgatcggaggctgtccatcccacgtcactgacgatgcctctcgtgatgcagcacccggcatcgcgcttcacatgcccagacccgcgagtttgtcgtccgtctcgccaacgcactcatgctgttcggcgctccgacccaccggatcgagggcaacctcgagtcggccgctcgcgtactcgagctcgacgcccacttcttttatctccgtgcgtcgatccccggcgctctctggccacgcttgaggcgcttgctgacggccgattgcttcccctcagccggcatcatggtcatgagcttcaaccggccagaccaagagacctcagagacggctttccttcgcagctcgggcggcctcgacgtccagagcctgcgcaaggtccacgtcgtcgtaagtctgcgccgtcgcctgtcgcctgtcgctccgtctcctccagctgcgaaggctgaccgtctgcccgattgacaggctcgtggcgtcatgcacgatcacatcggcgctgccgagggcgcacgtcggctgaagcgcatcacgggcgcccctccgcggcattccgtctggcagcggatcgttatcgtctcggcctgcagcttctttgcgagctcggtcgtttttagcggctctttcgtgcgtgctagcgctgctttacacgagagactgccctttggtgagcgctcgacgttgactctgtgccgatctcttgtcgcagctcgacatgtgggcctcggcgattctcggcggcttgatgggcacctgccagcacacgctcgccgcatggaaccccctcttctcgaactgcttcgaggtgcgctcgtctccttgccaccgagttggatcgctcgactgacccggatgccccgccttcacagatcgcgatggccttcctcatcagcttctttgccaaggcgttatcggcctcgggctacttctgctacgcaagtctgagtgagtgcgaggacccttgtcgcgtcgacctcggtgaggcactgacactccggaacgcttgcccctttgctcagcctcggccggcatcggtgagtgctcgatctttcgctgcccctcctctgacatagcgtggctcacaccccatctcggtcttccctgctgtcgcagtcatgatcctggtgcgtctcttgtctgccttttgactcagactgccttcgtgctgacgctctacctgctctaacccagcctggttacgtcctcctcacggcgaccctcgagctggcttccaaggtcgtcgtccctggaagcatccggctcgtctttggcgtcatcctctcgctcttcctcggcaccggcatcagtctcggcagcaaggtctatgtctgtgagtttgccgttgctgctgctctcgcagcggttttcaaagcgttcatcactttatttccccttcagtgattgatcccgagggtagcgcaagagcgtcctccttggccgcgagctcggcctcgggcgacgtcgtctgcgccaggagcggccacgaaccctggtaccaggccgacatcaggtgcgcgctttcgacttctgctatcactcgtctctcgctgacgccggagcccgatgcattctcagcccctggttcctcttcatcactctccccggcttcatcatctcgcttgctctctggaccaaggctcggctccggacgcggcagacggctgcgacctttgtcatcgcctgcctagcctacacctcgtacttctttgccaagcgggtcagtccctgacggcttacttctcccctgccccagaagcatcgactgacgccgtatgcctctcgcttcgccaggtcctggacgacgagcccgaggtgacgtctgccgtcggcgccggcgtcgtcggcctcctcggcacgctctggagccgcatcgcccgcggcacggctttcacgacgcagtctgccgccatccttctgctcgtcccaaacggtctcgccgccgcgggcgggattgtcatgagctcgtcgtcggggacagagagcttcaagcagggcgcagaggtcgcgcttcgccagatccagacgtcggtcggtaagtgctggcgtccgagtgcagactcgctccggcatcgtctgatgctgacgaccccctggtcccttctcttttcgaaaggcatcaccatcgggctctttgtcgccagtctcgtcacctatctcggcagccggaagaagcgcggcaccatcctcagctactagaaacccctacggaccctctcatctcttaactcgcatcttctctccatctatctcgcactggaaaacgcacggaaaagcgcatcccactgtatctcgcaactcttgacctcgaccactcgcggcattacacatgtcttccgccgcaccgtttggctgcttgagcagcgtcgtcgcagcgacaaacggcgcatcaaggtgcagtccaggagcttggggggtcgctggccgcatatcgtgcgaggcactgacggtgagatttctgctggggggttgtcggttgtactcctcgatctataagcgcatctagtttgccagccgctcgtgatcctggccggcgacctccctcccgcggacccagacgcgtgcaatgttgcggtcgtcgccgcagtagatctggcaaacagagagcagcatcagggtcagtcaaggccagtcaagcctcggccgggcccccagaacagccagaagagcgagagccgaacttacaaaccgctcaaacgcactctcctcccacccctcctccgcctcgtcctcggcgtcaaaccacacacccggcgtccgccgtcgacggtcaacatcgatgagcagcgcgtcccactcttttcctgcctcgaaggacccgacggccgagtcgaggccgacgagcgaggccccgccgagggtcgccatgtgcaggacggcagagagcgggagatgcgatgcccgggcaaaggagcggtcggcgtcgtcattgtcgtcggcggcagcggcggaggcggaggtcgtcgacggcggcggcggaggagcgttgaattggagggcctttgagccgagaatcgcggtccgcatttgtgacacgatgcccatctcgtaccctcccgagcagtccgttccgagcccgacctgccaaatccaagggagagagagaccacggtcagacctgtgccacgttcagaccccgcaaagtctcagacaatgggccgcactttgatctcgcggtcgagcatctcgccgactttggcgatgcccgagcggaggttgaagttgcttgacgggcaatgggcgacgcccgacgccgtgcgcttgatcaggttaagctcggcgttgtcgaggtgcaccttcgaaacgcgcgcgcgagggtcagcatccggcgcagtcgggtggcgtcaggagtagaccgaactcacacagtgagcaaggaccgtcctcggcccaagcagcccaaagtgttcatagacgcccgtatagctcccatcccacccgcctccaaccgccgcaaaaagctccttcgtaaacgcaatctctgcgaggttctctgcgaggtgcgtctgaaccgccactggcgtgccggcttcttgctcgtcggcgatcagccgcccgaggcctgagaggagcgcgggggtgcaggaaattgcgaagcgaggggtgatgatgggctgaacgagggcggtcttcagcgagggtgagagggagcggatgtatgcgatcagggcggaggtgtcggtgagggaggcttcggctgagggctcgatgtagtctgagggacagttggcgttcatgttgcactgcatcatcccagggtgcgccatgtcaatctgcgagtcagcaagcgggcgagggcgagagggaggtaggtacgctgagcgtacggacctttccgacgaacgcccgctggccttgcgcatgcgccgcgtcggcgaggaccttcgtcgcctcgaggtgcaagctcgcatagtaacagctcgtcgtcgtcttccctcgcccacccgtcccaaaaggccaaaagtcagcacttgagcactcgcgagagcgggagaggggcaggatggcggggggcggggactgacaccgaggctgagagtccggcggacgacgtctgggtagatgcgctgcgcgtactcgacagaggcgaagcgcgcctcttgcgggaaggtgattttgttaagccagtcgaggagctgctcagacgaaagaggggaggaggtcagggtcagtcgggtgagaggagagggaggagggtagggacgagagggagagtagtcggtagtggtcgcgggagagtaaggagagcgggcgaccgatgaaaggggagggccaagggcgggcttgctgcgcgcgaaggccgggcgccaaatcgtgcgtactcgacggccgcaggggcacatgcctgcgctcatccgggccgctcagacactttcatccaggcacgagacggcgtcggaagggtctcatgatgattttcccccgctgccaaagagccgcgatagccaggacgtcggaggcgacgatgccggcgtttgctctacgtccgcctccgcctgcttgccgctctgctccgcactcgtcggcgcctcggagtcggttttgcggccctcggtggcggcggcggcggctgcagaggcagcggcctcgtcttcggccaccaaggagggaaccgagaggtatggccggaccgacgggcgctcctcgtacaggtggttgagcgtatttgactctgcgacattaccgtcgctcgccgacgcgggctcggccggtgacgcgagctcggtcgatggcgaggccggcaggagatcaagcgtcgactcgttcgtgttcctttgcgaggcgagcgatgttgccggcggcgctggctcgtcggtagacatgagtggccgctcgtctgcggccccagagggcgttgctgctgctggcggtggtctgggcgacgaaatggccggcgacggcggaggagcgctccgagtcggcggcggcggtgtcctaggcgcgaggaagctcgtcctcggggtcttgaggtgaggtggcagcgaccgatcgggatgaggcccaagcttccagcggccggtttcttcctcctcctgcagcttgcgcctctcgtcctcgactgagcccgtgacggtctcgacgccgagtcggcgagccattgcgctcctcgcccgattaagcccgcccccgaagccagcaaacgtctggagcgccctccagagccgcgtctcgaacgtcctgaagtggttggcgttggtgatcggcacgtaagggtgcgcgaaagtgagcgagggtgggtaggtctcttccgcccgccggatcgcgttccccgaaagcggcgtcaagacgaccgtgtaggtgagcgagcgtcgaagtgcggcctcgcgcgccgcctcttgagcttcttcggacatctcgtcgtccgcagcctcgccttctggtgcggaagtaggcgaggtggtctttggcacgatcggtagcgtcggcgaagcgtcgaggtcgttctcggacgcttcggcttcgtcggcaatcgcttgaggctggtcgctcgtcgccagcacgagagtgtcgcctttagcccgccccttctcgacgagctcgctcagtgtcagcttgcggctggggagacgtacgccgccagtgtcatctccgtcgtggccggtcccgagccggatgacctcctcgagacttggcccaccgacgctacgggattgcgtccatgtcggcagctgaagcgtaaaggcgtatccgggttgcggcggcaggtagagcagctgccgcgtgagcgggtgcgagcgaagcggcgtcggcggcgggagcgacggcaccgatgccaacgtgaggttgaagcggtcgcgaggaggcagtaccagcgaaggcgattccggctcctgcgagaccgaatcagagtcagccttcaggccatcggcgactacaggcgacaggacgcactggcaggaacgaaatcttctcgacggctcccatctcgcgcttgatgatgccgatcgtgccgagcctcagcgctagattagaaagccggcggccctcgacgacattgccatcagcatcgcgcagctcgccgacaaaagcccggccgacttcggaatgggcggcgtgctcgtctggctgggcgagctcagggtcggccaggcgcgcccgcgtccgcgaaagcaggtcctggaacgacgagggcggtagcgccgacgacacggcctgctcctttgggctgtcgacgacgtccaacaagttgggctggtgggcttgcaagaggccggttcgtgtgtctggcggccgggcggtcgtcggcggcacgcggaggggtgacctcaccggcgccgcaccgtcaacgaggtaaggcgacggccgcgagccgaagtcgggcgccgcattgggcgccttccgaggccgccgtgagctgcccggaagcgatgccggcggtggtggaagcgttgaaggctcgcccgtcgtcgatgctgctgctgtcagaggtggtggtggcagggtgtacgaccgccggctgaccccggcggaggtgctgccacagcagcagcacgccgacacccgtcgtgatgggcgggcagagcggagcatgggagcgagctggcctgctttaaaggtcgcagggtcgaggcgagagataatgtcgagtggcagtcagaagcatccctgccgactgcttcgacggccgtctcgaaaaggcccgccagggtgccgaccttggcccaataccttcaccctctgttcacgccctctcccatctcaaagcctgctcgacacctgccgaccacacagatctcaatcgcctcctgatccctgggacctccggcgttttcttgcctgatggcgtctcgaatccgcgaagtctgggcggacaacctcgacaccgagctcgtcgccctgcgcgaggctctcggccagtacccggtcgtctcaatgtgcgtcctccacgactgcagagaaggtccttcagctgtgggggccgtgctgaactattacttcggtgaccatcccttccgacagggtgcgtgccttcgattgcgctccacgacgtctgcgagctcgacgagcgcgagctggcgagctcgacggctccgtctcgcgtcccagcgcctgaccaacgatctcctccctcctctgcccatctttaggacaccgagttcccgggtctcgtcgctcgaccgataggcgccttgtgcgtatcttcagggcaggcggtccttttcaggctccctcgctgcccggctgaccgtgctgctccttgacctgccgcctacctcgcagcaagacgggcgccgactatcactaccagacgatgcgttgcaacgtcgacctgctgaagctgatccagctcggtgtcaccctgtcggatgaggacggcaacctgcccgacaagtgcacgtggcagttcaacttcaagtttgacacggggtgcggcatcgtcgtctcctgcttcagcgcattggctcgccctgcgcttgactaactgacgcgaccttggccggccgtccagggaggacatgtacgcgcccgactcgatcgagctgctcgagcactctggcatcgactttaacgagctctcgctccggggcatcgacgtcgcctactttggcgagctcctcatcacgagcggcctcgtcctcttcaaggacatcaagtggatctcgttccactcgtgagccttagcactccatctctgacgtcctgtgcagatgactgatctcgcctttacctccctcacgcactagcggctacgactttggctacctcgttaagctgctgacggaccagccgctgccggcatccgaggagagcttcctggagctgctcgagctctggtttccgaacatctacgacatcaagcacatcatgcgctcgtgcaagagcctcaagggcggtctgcaggaggtggccgactcgcttcaggtcggttgggccgcgtctctgctcttgccctgctcggcagctgactccttcgctcgctgcgactgcaggtgacccggatcggcacgcagcaccaggccggctccgactcgctcctgacggcggccaccttcttcaagatgcgcaaagtcttcttcgacgaccggatcgaggacgagttttaccggtacgcctcggaatggcctgtaagaatggcgccctcctgatcctgacgcccttctcccctctctgcagcaactttctgtacggcttcggaaatgcccggacgcgtgacccgacgaccggcggcgtatcgtacctgacgcgcggcctctctggcacgccgcagctcgtcgcgtcgggtctcgcctagcgtcgccctgatgctgcccggccgtagaggcctctttcgtcttcagagagaaggcatgttgtatgaattcttcgtcgcgttactgaacgggagggtggcctcccatccagagtgtcaggccgcgcgcttcgccgagtgtgacggacccaggctcctcctgcgcccaagcctgcgaagagatcgtccctgctgcgaggaggcggctgcgggaggcggcaaacagagcaggatgcatcagcgacctgccgtcgagaagagcagggtggacatgagctcactcgtgcgccaggacccagtccggcggctgtgagccgacaaagactgagctgcccgagctcaagccctctttgtacggcgggacgtcgaggaagcagacgagggagctgaggatcgcccgagagcgttgtcagtctcgttcagtttgtctgaatgctggctccgaggggcgacgcaccttactcgcggcgctcgcaggaccgcctgccggacgtcccaaacggtcacgccggccggattgataacccgcgtcgggccaagccacagtcggagctcctgtgagtgcaaggcgagaagcagagtcagcatcgaggcggtacgaagctggccatgggcaagcgcaccaccaccgggggcaaggtcgcaaactgaaggaaggaccgggtctgtcagctcgtcgcaaaccacgactcagggagacgtaacgcagcctcaccgaatgcgcaatgactgggtaacgctcaagcagattgccgtcccactcgccttcgctcgatgcttcgccacgttcgacgacacgacgttcctttgcgagcttcggcaggcgcagcagtccgtcggccgtgtcggccgctggggcgacgtagggattgatctcgagtcgggcaccagtcctgcgaacctgctctgaggagagcggctgctcgaacgtccgttgatctgcagcgaatgcccaaggtcagtcagcacattgacggtgctgacgctctctccacggaggaactcaccgagccacctcagcgcgcaaggagtgactggtccccagaagagcgtcgcctcgacgccctcgctgccagcctcgacaccgacgacctgaacggcgtccgtctcgccctcgagctcatcagtcccgatgccgaccgcgatctcttgcgcgagcgctagccactcggccggcgagtcggctggtcggacgtcgccggcggggttatcgagccgccggcgtgagagcgagaagccggcctgcatcacgagccgttgccagatggacggcagatcgtacagcttcggcagaggcacgcctatcacgtcagcacaacgcaaagacgtcgggaggaagctcagcaagggggcgcacctgctcgtggatcaggggcgagctcgcgctcaagttgacgtgcgtccggagacccgacgccgtcggtgggattaggtccctgacaataagcaagacgtctcgagggagactgcacatcgctgttgtaccctgtaagatagaaggagtcggacaaggtggtgagacggtagtgagaggcaagatggctgaagctgagtgatggtcggaagagtcggcgagctgcaacagcggagctcgcacgatgactgggccttcgctcgcaacagtaacccttcctcagacgtctgttcaagtcctgccgatgaatactggtacgccgtcgacagagatacaagggccgcctggtacgctgacccactgcgtcctgcgcccgcttgcaggcgaaggtagtccgttcctctcgtcgctcggcgtctcggcccgtcggacccgacctgacgatgcgaccctctcgtgtctctgcaggtctcccgatccgtgtcggagacgactggtgctcgctcatagtgccctgggcggcaatcgctcttgccctcggcttcctgctcgtccggaggggtcgcagtatcgtcgaaggcatcgcgtaccggtccgtgacgtcctgcttccgctgcgacaggcaccgccctcgctcattcactcccagcacgacagtgtccgacatcgcacgctcagagggagctcgcagggtcgtatccggctcgccgaccacgagtggaccgccggaacttcacccgaggacgacgacgacgaggtgtcaatcgcgtccttcctgactgcccgcgccggcggtcctgctggcggaacgtcgtcgatgacgccgccgccgacggcgattctcctctcgccgcctctagcagcagcagcagaccggccaaagttggcgccgcgcagagcagggtcgagcgagagcgatctctttgcggtgggcgaaagcggcgatgagggcgcgcgcgagctgccagagcgggtcgagacgggcgacctgccgacactcgacgatctggcgcaggagggagggggggccgacgacgacggtcaggcgcaaggcagctcgtcagccggtcggtccgagtcttagatgcacgtgctctgttggcctagacggctcggttcgttcgtgatccataaggtggtcatgcagtgcgtcgctccgaggcatcctccccgtcatctctctcccctcacgactcgttcaaagcggccccgccggtcgtcgcaagcccctcgccagcctcctcaccccggccaacatcgcctgccgcctccttcccaagtcggtcctcctcctccgcgacagccgcgagcgggtgcgccgccgactccttcgacgcgccgtccaaagcgggcccggccgccgcttttggcggaggcgagagcggcgcggcggagagcgggggcggaagggcggacgacaagggatcgacgggggcggacgagcctgcgatcgaggtcgggaccgccgcggacgagctcgaggtcgatgcggtcggcacgtcctcgtccgggttgtccctgcaggggcgcagacagcggtgtcagcagatgtgccagagcagcgacagcattcgccggaagttagacgcaccaggagttggcgaagcgagtgacgcgcggctggcctatctcgaccgtccggacaattttgctgagctcgcccgtgatgcggccctcttcgacctcggtcccatagtcgctcgtctcccagttcgatgccacgtagtacccgacgcggacaaactccttgtccttgtagagcgcagagaggatgatgacggtgacgccaatgaggtcggcgacgggcgggccgagcggtgaggtcgagctgtcggcagcgggcagacgcttgagctccggtgggtcggcgttgaactcgaacgtgttgttgccgacagggactgggccaacctgcaggcgggcgcaaaggcggatcgagggagcgtgtcagccggtgtgagccgccgcgcaggcgagcgaggctaatccacggcacgcaccatgaccgaatcgagctcctggtcaaactcgtcgctggctgcgctgccgacataagtcaatcgccactcgaggtctgcagccgtcgcacaaaggaacagcgagcgaggcgagcgagggcaggtgggaagcgagggaaggcttgatcagctatgagcgaccctgagatgagcgccagaaccgggacggaccatcctggagttcggctatcgactcgaactcgatgttgatccggtaagggtcggtaaacttggccggattgttgaggactgtaatgcgagcccaaggagatcagctcgggcagctcgaaggtgcacttcagaggagtatggcgacggacactcgatgttgcgaatgttgacgatctgtttgcccgcgcggagtcacgagcaggatcagcgacagagctcatgcactcctgcaacccatccagggactaaccgacatggctgggaagtgtgtgggagaggtgagagggtgattgcgggttggccagcaaccgacgcgtcgacgcgtccctccggcgtgaatgagctcgagccagattcatcaatcaattcatctatcatcgcccgcgcgagcggcccgcgcgctccgcgccatgatgctgctgctgctgctgcctcgagcgaccgacgacgccatcgaccttcgctccctctccctccccttcccttccttctctccgtccataggctcatgcagccctacgccaaaaaggtgcgccggagccttctttaagccttcatcttgaacgcacgctgacgaggcctccttccgctcgccctgcgtcctgcgctctccttgcctgcgcccaggtcgccctgggctctgccatcgccctgtcggccggcggcggctacctcgccctcaacaagcgtcggccgatcctgatggaggcttacctcaagcgcgagaaggtccgtctgcgccgtcgtcttggatctccgggtcaggcagctcagctcatccgcgctcgcgagcgctgcggcccggctcgtcgagatgcgaaacccgagaagagccggtcgaagctgacgttcttcgctcgacactccttgttgcgccctcgttgccacccgcttcaaatgtctgccctaccgccgcgacgaccgcagctgccaatctacccggcaccgcagccagagattgtcctcgtcgagacttcgtccgacctcgagtcgcacattgccgtcgcacgcgagcagacgacgtcggtcttccgctcagtccgggacgagacgcagaaggtcgtcagcatgtggatcaacatcgagcggagggctgccggtgcgtcttcagcccgaaaggtcttcgccggcgacaatccagaagctaatctttcgctcttcggctcttgtcagcccacgtcaagcgcgtcgtcccagatgacgagccgctgacgccgggaattgcctgggtcggtgtctcgacgcttgccggctcgctcgtcgcccgcaaccgtgcgtcccccttcgaagttagcctcaggcggccattcggggctgatagctctgtgcttctccttctgacactgcgctgctctgcttcttgacgccacgcctcgtcctcaggcaccttcctcctccgcatgattgctcctccggccttcttcctcatctcgctcccttacttccttcccaagctggcggccaacctctcacgcgaggtttcgacgacgacggcggtccgcgcgcccgagtttcacggccaggcggccgcgctcaagcaccagctcgacgacacgtttgagcatgccgaggactggttccaagacacgcgcgagtcggtcgccggcaccgtcggcaagaccgtctcgtttgtcgagcgtaagacgggcctccagctctaccaggcgtttgagagctcgttctcgcgccggcccgaggttggccaccacggccacgagacggagcactcggcgcccgcgcacgagcgcgtcgccatctcggccaagccggtcgaccacgcgaccgtgccgctcttcatgcagacgccgacgacggcctcgaccttgcccggcacgccgattccggctccgggtacgacgacggccggctcgcccgtccagacgctcgacgtccccatctaccggcgcgtcggcggcccggcctcgacgaccgagcagctcgacgccgctgccgcccgggtactatctaaggtcgaggacaaggttgccgacggggtccgcgctgccaaggcgagcgacgccggccaggctgctgccaacgcggccgaccaggccaaggctgacgttggctcgggtctctccagccttaagcgcaaggctgagaatgccctccactcggccgaccacaacgccgcccgtgccgttggtgccacgaccgacgccgtcgaggccggcgagcgtaagctcggccagacggtcgacgctggtaagcgcaaggccggcgaggcggtcgacgccgcaaaggcctcggccaaggtcgctgccagcgaggctcaggcggaggccaaccgggtcgtcagcggtctcagccagggctcgctcgcccggaccgctggcgacaaggctcaggtcgctgctagcgaggctaaggccgaggccggtcgcgtcttccgtggcctcgacaacggcgccgacgcccgcactcttgcttctggggccggcgacaaggccaagtcggctgcccgggaagcccaggctgaggccagctacgttgctcgcggtctcgacaacggcgggtcgcttgcccagactgctggcgacaaagcaaagacggccgcaaacgaggcacaggccgaggctggtcgcatcatccgcggtcttgacggcggcgtggacacgcgttcgctcccccagacggcgggcgacaaggcgaaggcgctcgctcacgaggcccaggagaaggcgaccagtgcggctcgcgccgttcggtcaaagacgaccgagtttgccgattcggctcaggacaaggctgcctcgaccgcctcgaccgcccggtcggaggctgcgcagctttcgaacgagggctcgcgcgccgcccatcacgcagaggacgcgacggccgaggctgcccgcagtgcgcgccagcaggccgagcgggcagcgtcggcgacgcgcgccgaggcctcgcacctctcgcacgaggcttcgttgctcgcctcggcggcccaggctaagggtagccagctcgcacacaacgctcagcaggcggcgagctcggccgctcgcacggtcgagtcgaaggcggccgagctcggtcgcgagggcaaggccctcttccaggccggtgaggacaaggctcgttcggcgctcgcctctgcagagggcaaggccaaccgggcggcctcggccgtcgagtcgtcactcgatcacgccaaggccgaggcaaaggacggcctcgagcgcgttaagagcgaggcggctgacgccaagcgggcggccaccaacgccgacaagcggctcaaggttgacgagcagacggtcgacggcaagcgccaggagcagccgccggtcgtcggcctgctcgccggtcgcgagcgtgagactggctacaagaagctcgtttagagagacttccgacgccagctccgtggccttggcgcgaatcttgtacatgactcgttggcacaacaccgcagtcggcagaagggaggcggtcaaagggcgggcggggaaggaaggcgggtgtgcattgggtctgtgggcgccggagaaagctgctctagaggaaatgggtggtatacagaaagactgaaagaggatgggacggcatgggggttcgtaaggtcgtgagatgagggagggagcaaaagaaggacgatggccggcaggacgccgttaggtatcgaagagggaggacagtgtcggctacgagagatggcccgagtgtcagtctctggcaccctatgttgtcgagtaggcctcgtctgacgcaagcgccggcatcaagctttgatcggctccccgccgagccagctctcgccggtctcaagagccgacgccgtcagcgacctacacgaacgagagccagtgacgtgtcagctcaagtcgagcgctatggatagggcccgtctcttcactcacagcgtcgcatgcagcttcgagccgagcaggccagccttggcccgccgctgcttgatcgcactctcgtcgggcggcttccactcgatcgcgctcgcccgccggcggtggttgcgtaggctcggacgcttgacccgcggagccgtctgagccctcgcggacgcgtcccagccctcgtctgccgtcggcgacggaaacgaccggccgttgagcaggatctcctcctccttgatggcgttggttgtctcgcgcgcaaagatgcgcttctgctcggcaacaaactcgttctcggcctcgtcctgcatcgcctggtcgatcttgagcgggctgttgcgacgcgtaagggatcagcaactcgtccaggtccaccacggcatcgaagagacgtacaccgagacgacgacgcgcgtcagctgcaggccgagccgcatccggccgcgaatgtcgagccaccggagcgcgcggagcgcctgctgaatctcgtagagccggatgatttcgaactggacaactcttgtgtagcgctggccagagagcatcaggtcgcgcagccgccgaaagacgccctccattgactcgacggtgtcgggcccgaggttcaggccgcctgtcgaggtggcgagaatcagcaggagggccggaagcacgtgcgcgcagcaaatgggcggccgacgcaccaatgatgacgcgaatgacctggaagtcgccgtcgataaagtcggtccagatggagagcaggacctgggtgaatgtctcctgggcgttggtgtcggcgacggcctggtcgccgtcctcgccctgccacgagaagttgaacgggttgagggccgagccctcgaggttcgagtagagcgaggacggcgaggcgtcgtactgtcgcttggaggcaggcttggacaggaccgagtaggcgtacgacagcttctggaaagccgtcgtcgcgctgtcatgacctttcggaaatttgctgcaggcgggaagagggcgggtgagagtgagggtcagcgccgccgcttccctcatgacgcgtcgcggcggacgacagcaaggacgcactctggatggacgctccgacaacgctgcatgtagctccggcgcatctcggcaccatcagcccagcgctcgacgccgaggacctcgtacaggttgcgtgagtcgttgatcaggtcgacgagcttctgctgctggagctggtccggcgtgagcgcggctgctggaaatagagcgggtgcggatgaagtggcctccggtcagcctgctacctcaaagtggcacatgtatctcgccagatatccacaggcactggcttcagcttcagcggcacctggtctgcgccaaggcggtagcggcgacctctggctctggctaaggctcttgagcggtgagagctcggccgcgttgcctcccgacagcctcgagcaggatgccggtagctagctcacctagtgggtcatgccggccgacagctggggacaacatcccgcttggtcagggctggatggcctccctgattgcttgccgggtgagagaggatgcgagggaggaggattagggaagggtcggggcgcgggcgggagctggtgctcgctggaagagcggctcggcggtcggccaggtttcgcggccgggctgcttcgtgcgaggtgaagagggcagccagcagggtcgaggtatgatgggtgctgggctgcgtctggtcgagttggttgggcgttgttagtcggaaagagaacgagaggcggccgcctcgccctctcccgtcccgccgggcggcccatggcgttgggttggcgcgcgcgcgacggctgcgcgcgaaaggctctcacatgcttgcgtcgtcgcctcgtcgccgtcaagtgctcatgctctgtatcccaagactctgcaggtgcctgtcacgcagctgacagagacgatgagacggtatgaacggagtttccaagtctcgatagagggcgtttggcgcgacggcaacgtcggtgagggttgacaggcgggccgacagcgttcggcgagagtctcgagtacaacatgagattgcaagggccagaggagggtcgttagaagaggtcatgaaaggatttgcgtgcggaggacattcaattgagtcggggctgcttcggtggccggtcgaagtcggaggcctcctcgtccgggccgcgcttggcgtcgccctggccggaatcgtcggcagcgaccgaaggcgggtgctctggcaacgtcgaattctcgaagacggtgtcgccgtatccgctgagaccggcacttcggccgataccgtgcagggtctgctcaagctcgcggcgcttgccacgctcgtcggcgagcatcgcccggaggtcggccatcgcctgggccatcatcgtccgctccattgcccacttttcgtggtcggagacagccgccttcttgagctgacggatgtagtcgaccgcctggccgaggataagcgacttgttcttctcgggctcgggtaggagctcggcaatctcgttgatgcccctcgtgatgacttcgcgtcgcttacgctcgaccattttctgtggcaagccgggcgggatgacgaggtcagacgcctggcaacgcagcgaaagagatgaccgcggaccaagacgtacgtgcgtctccttccggttgggcttcggttcgggcgaccgtgacggaggttgggcggccgcagtaagcggcatctccggcctgtgactcgttgagggaatgtagagctgcggctggggcggatgcggctcgtgatgctgctggccgtctaagcgtccttgatgaggccgccgtggcgactgcagcggccgttgtcgcgactgcgtctggtcggaccgcagagcatcctggccctcagactgctgcaagacgtgcccgtgatgcgagtcgcccgccgagtccgactgcggcgggtcaaagggatcgtaatgcgccgcgtcgtctgggtggccatacgggtgagggttcgagctgagaagacggtgacggtcagcacgcgcccgagcgaccaagccgttccgccgtcacgacaaggcgcgactcactcgtgagacatcacagcatgcaggtcctccatcgtcggagtatgcgagctcgaagctgtctgacggccgcggtcctgctgtcgagagggaagggaagtcgacgtcagcttcgggcgcgattgagctcgcggttgtaagaggacgccgacggaccatcgcatcgccgagaggcagagcgtcccaaaaggcctgcggcagcgtatgcggattcggaccgtcggcgagcggtgtctggccgctcccatcgtcgagagcgtcggcaagctcatgggcagccgacgacgaaggcagctgcgacgctgctcggcgggcatcgccgtcgtaggcctcgccgctggtttcgacgagcgacggatcgagcgccgggtcaagatcgtcgtctgtcggagcgtcgtgcgggcggttgtcgtcatcgtcgtcgtgttgctggtcctccatttctcgtcgttcggctgaaagatcgtgcggtgctgtcggcgactggcacggggacacaggcttggtcgcgtcggttcgaaacgccgcaggactgcgacgatgcagcgcggaagggcggcctcgacaggcctttgagacgaccgcgaaagggagtctcgagcctgaagattaaatcttgctcaagcaattcaagcgcacgcaagagggtacgctgattcataattacactgaacaggccgagagtgaggagaaggggaagcaggagggggaccgtcgcatcgggcttgcggtgcaaagacgccgcgtcttcagaagcctagcttcgacggacgaagacgcgcgtaaaggccgacagcgatgactgccaaaaatagaggagagcatgttcaattcaagccgtgagcctgggtgcaagagatgacgccacaactcacgcggcaggccgacccagaaggcagcgatgcgggcgcccgatgagagcgccggcgagagcgaccaggtcgagtgagcgccgccgaggtgggcagtaaagaggagcgagccgacgaggaggtagccgagtgcgcggtggtacttgaagaaccgcttggccttggccggtccgccgaggatgcctgctagcgctggcgtcacggtcgcgaggccgaaggcaatctgagcgaagaagacgcccatcgtcgcgaggccaaagcaggagtgccaggtctgcgaaatcgagagttggtgaaatgtcagcgatgatggtcgaaatgaaagggcgtacgagactcggacggaccgtgagatgaggtgcgccgttccgcgccttgttgtagtacattgcggcagagccaatggccagagcagggagggagagcatgagaatgagcgattggtgcagcttaaggcccttggctgcgaaaggatggagaggaggggggggggtcagcggctgcgcgcggcaggcagatccaccaggcagagcaagcacggctcgtaccctttgacgaagcgttggctgtcggctgaagctggccgatcgctgtggagcagagaggccggtcagcagatggtccgaggctcaccgacgagcaagcgagagcaacgcaacgtaccgatgacgaggagggcaatgccgagactctggccgctcgggtggaaggagaaaggcgagccgagcgagctccagttctcgtagacgacgatccaccaagtcgcgccgaagaaaaggccgaggccgagtatgagggtggcgagcgcgagcgagtcgcccgtgcgggcctctcgcttgagcgaggccgagccggcgacgtccgaaggcatagagtcgaccgcagatgagagcaggagcgcggcgttttctccggatgaggagctagcggcgtgaggcatgcaaggacgagaggaggccgggagtttaccaggccggatcgggagggcggaggagcagagttcaaaatggtggttgaggaggcgggaggcgtgtcgagctgctgaagggcctcgcatgggccgcagctcctggccggctggccggggcgaaatcggctgatcgcgaatcagatgtcggtaatagtgaacccgctcgactgcatgctgcccgccgagcgcgagatcaagcctcttgtgcggccaggctgaaggcagagacgcaggctcggccgaggcgatgggagaacgagttggccagcgacatgcgacagcccttcatctccgtccagtagacctggttcggcaggagcgagcggcagaccggcatgagctgcgtccggacgagtgtggccaaaaggggcgagaaggcgtcgaatgcgagaaggccgagatagagctgcgagagggacgtcagcgccgccagctcagggacgagaatcgactgcgatagtcgggttggtcagtactcatggtcaggttgtgagcaagggagggagacgcacgacgtcctcgtgcagcgctgcgaccctgagctcggcatgctcgccgaagagtcggacaacctcgagtgaacgcccattacgcgagcgcactcggcgagacaccgcaagcggttgacgacgacgtccttggagctctcggtgaggcggctgctgacctcgaccgagaggacgcgcagccgaatgcctgcgctggcgagagtgaccagggcaaaaccgagctgagccgatgaaagctggcagcccgagaggtggaccgcctggaggcgcgggtgcctcttgaggaaggccaggttgagcggcaggcgaaggatcgccgggctctgtcgaagaatgcttgggtcatgatgcgagcacctgcgaacgggtgataagcgagacgacaaagcgatcaacaagacaataggtcaaaaggggccaatcgtattggacggaacaagcgcagacgagtgaaatgctctagggtgcgtcgatgtggaactgccggcccgtcagcgggtcgctcagggagtcgatgacggcggctggtagaggtcgctggatcgcgagcgcacgcagggccggcatgtcatggacgagccctggacgacggcacccgcaccaaaacggtcggcttgctgtgacgagacctcgtacaaagcacgcgtgtagacggtgagctgccttcgtcaagcagggtagttagtcactggccgcctgcgcgttgaagcaggctatgatgagcaggacgcactgggtcgcccgggccagccatggtcgggctgagagtcaagcaacgcgctccgagccaccgagcttgatgaccttgaacaggaggctcgttgcgtccctctcccaccggcggtcgacgagccggaaatctcccagccgtcgagctgccattcgagcatgcgcaagctgtctcctgagggcgtaagccggctcgcgtcggtccagccactcgacgtcgtcgccgtcgtcaaattcctcgtcaagctggaggcgcggcttgttaagaaggaagtcgagcgaggcctggaccggcgggaggaggtagcttgcgatctcggcaaggagctcgtcgggcaggttcgagatggtgacggcatctgcgcctgcaactgagctcgggccgacagtaagcggcgggtgctcgccccaccttgaatcgccggtatccggtcctatcgtgcgggaggcttaagactactggtagagagaggctggcgctgctcgtcttgtatgtgagcaggaggaggttgaggtgaagcagggcaagagctagcgtcggccgggacgacgctccgccggctcggcgagtcgcaagaccagagctcgtcctcagccttctgacctcccaccacccctcacctgttcctcttctcggaatgtccttctctcagacaccgacatcgccaccgacctcgtgcctctcgagcttcaagagcacgctcgaaggcctgctgtacccttcctccgccgccgccgccgggccctccgcagcgccggccgaccgcaaggaagccttcgcttactcgccggccttccctatggacgtcaagcctcggccactggacgagcccgagcctggactggccaaggacgccaagatcctcatctttggcggcggaggcacaatgggcagctcgacagccttggaacttgcgaggaggggatactcatgtgtcaccgtttgcgactcctttgcgattccttccagccagtcggccggcgtgcgtcccccgtaagtctcttttgagccgcctcagatctgacctgctttcatttcctttcagaacgaccgcaacaagattgccggtggaggcagccgttcgggctggcgggggaagctggcaggtgcgcccgtcgggcgatctgtgcgccttcggctctcggctcccgttcatagctgatccaaaccatgcctctttcctgttgacaacctcagacgacatcatgaagggctggcgggaggatcctgtctttgcgccttactaccatgaggtcggccgtgtgagtctcgtgaaccgtcgctgccgaccggccgagagagccgccagcctggctgctgaccggaaggccctcccgccgacgacggcgccagatcacgacggcccacggctcgcccgagcgcatcgcggacctcaagcggacgttccaggatctcgtccggcgcaatcccgaggtcggcaagacgtacgagtacctcgagtcgcgcgagaagattgtcgagaagatgccgcagctcgccaacgcccacattgacgtgcgttcccagtcaatcgaaccgtctcttccgctattccatttgacggctcatctcttttcatcaccacagggctgggaggcctactggagtcccgacggaggctgggtcgcggccgtcgacacgatcgactcggttggccgcgagctcgagcgtcttggcgtcgagatggtctggggcaagtgcgtctcgccaaccggttctcgaccccgtcacccgcaccatcggcgctgacgacgatcctttcgaccgcttagagcgggcaagttcaagaagcccctgttgtcaatcgaccggacgacctgcatcggcgccgagtgtgaagacgggaccgtccggctcgcagatcgggtcatcctcgcgtgcggagcctggacgccgaccctgattgacctcgagggccagtgcgtcagcaaggtgcaacagttcgacctgagcttgttctctgcgttgacgcagcgactgatccctgactcgcgatcgtccaggcctgggtcctcgcccacatcgaccttacgcctgacgaggtcgagcgctatcggcagatgccggtcatctacgacgaccagctcggcttcttctttgaggcatcgagcgacggcaagatgaagctatgcaacgtccgtctctctctttcgcgtcggctcgcttgtaacgcgttgacaacgtcccttttgcaggagtttgccggctacacgcgcatcatttcgcaccagccgtacggcgcgccgaagcctgagatgatcagcgtccctcggagtcatgccgttcacgagtcggacacgatgccggacgaggccctcgaggacatcaagcggctgatcgcgacgctcctgcccgacctcgtcggccgcgagctcgtcgacgccaagatgtgctggtgcaccgacaccgccgacgcagagtggctcttttgtgaggatccgcgctggtcacacctcttcctcgcaaccggagacagcggccatagcttcaacacgatccctcacgtcggcaaggagatcgccgacatgctcgagggcaaagttcgtctcagcgaggttgatccacttcgcgtctccaatgactgactccctttctgaccctccttctcacagctgagcgccgagaagcaaaaggcgtggggctggcggccgggaaggggcgacccgaagcacaccggtcggggagggccggcgcccgaagacctgaaggacaaggccggctgggcgcacgacgatccggcggacgaggtttgacctggtaggatgacatgcgtgctcgaaccgaatcttgcgaagtgatcgtcgattctgcctcgcctgaaagtagtgcaacctcgccgtacgccctagtctcgcccgaacgctggtccgcagcagcagcccctcgcttggcctgggcggcacgcggctcccctcgcttcggctcgacctcgacaagtccccccgttataacaagagctgttgacggtccttctcctgactaccatcctcatcatcaccatcctgcatcatgatggacgagaagttccttccctcgcctgccagccgttcccccggctactcccgacgccgtgctcctagcctccgagctctgagctggtttctcggcaccggtgtcggcctgctgctcctcctgagatcgcttggctcaagcgggctcgacaagctgctcccctcctgcgccaagcaccaccaccaccggcaccggccccctcaccacggccacaagggcgtcaaacggacgccgaacgcgaccatcagctggctgccttgccccgaccagcctgccctcttttgctcatcattcgtcgtcccgctcaacccgctcgagcccgtcaagggcgatgatgccgacatcgttcttcgcatgtatccggccgagaagggcaagcgccagggttctatgcttgtgaacccaggaggacccggcggcagcggccacctcctcattgctacgatgggcccggcgctggcaactattgtcgaaggccgctacgacatcgtggggtgagcatctctcttgatctttcggtgcagctctgagctcatgggctgacctgctgtctgtgacctctgcagcttcgacccgaggtgaggagaagacgcgcgcacgctctctcgcccctgccatcgctctcgcgactgatcccgctcccgtctccttccttcgtgttgctctaggggcgtcaacatgaccacgcctttcatgcaggcctttgacgactcgtggcaggctgagctctttgggcttgagcaccggattgacttctcgcaagtcccgacgcagcgggccaacttgagcgatcctgctgtcgtgcgtcgactgctgcgcgccgacgggaccgcttattcgctgaccctcgtccatcgactgtctctcagttcagggagcagcttcgcggcctccggcaccacgacgcactggccgagcttgttaacgacggcatccgccagcacgtccctgaacgggagcgccgggccgtcagcacggccttcgtcgctcgcgacatggctgctctcgtcgacgccctcggcgacggcgatcagctcgtctactggggtttctcatacggtgcgtcatcttctccgtctcagctcggacattcgtgcttaatgatgccgcctgcccttcttctgccaggcactatccttggcgcaaccttcgccgcgatgttcccggagcgggttggccggatggtcctcgatggcgtctcgcgtacgcctgcatccctcgcctgcaagccctggctcttcactgacgctcttgacgttgcttgagcagacgccggtgactacacaaatggcctcgacaagtggggctggagctcgatgaccgactccaacgtcgtcctccacgagttttaccggtcgtgcgcggctgccggcgcctctcgttgtgctcttgctccgccggctgtcgacgatctctccgagttggatgcagctgccgccatagagcgcaaggtcaacggcctagttgactcactgtgggagcggccgctcggcgtgcacgtctccaagtacggtccggggctgctgaccgcgaccgagatccacctcatcgtgcgtgcaaggtttcctgctggcgcatgaccgttcgtcccgctgattggccgcctttcctcagatcttccaagcactctatggtccccagggctgggctgctgtcgccgatgcgctctcagctgctatcgccggcaatggcacccttgcgcgcgagctcaccaacttacccgaaaagcttaacgccgaggaccccaagcgcgttagggacctgtcggacaatatgttccaccggcgagtaggaggcagcagcggccagccgaccaacgccatcctctgctcggacgagcgggccgagacgcaggacctggaggagcttctttggcggtcggatgaggtgccctgtctcctcgcgatgctacctcgatcgagactcatctgacccttgcccatcaccccttctgccagctccgcgagcggtctttcacggcgccaatctggacgcagctcatgttgacctgccgtagcgtacgtccccgatctgacttctcttggatgacgcaccggctgactgaaagctgcccttactcagtggactgaccgaccgttcgagcgttactctggcccctggacggtcaaggacggcttgcgcaagacgcgcaacaagctgctctgggtcagcaacacgtttgacccgtacgtctgctcgctggctctgaccgaacgacccgactgactcctgccgtcatctccagtgtcacgcccctggcttctgcaaaacggatggccgacggctttgggcccgagtcgggcacgctcctcatccaggaggcgcgcgggcactgctcgccctccgagccgtcggtctgcgccgcgaaggccatcagcgcctacctcgtcaacgggacgctgcccgctgagggtaccgtctgccggtccgacgacctctcgttcccgggcggcaaggccgaggtgtcatcgtcgcatcacagtgcagaggacgccgccttgctcgaggctgtgcacgccctacatgagcctgtcctcctcggcggcttcttctaaattcagatcgccccttctcgctctgcacatatcgacgaccgttttcaggccaacaggcttgtgagcgctggctggcttccgggtattttggttcccggggcgacgagggggggcgcggcgtctatagaagggtcgtcggttagtcgcccttcgaacgagctgtcagccagaggagtcaggtcgcacatctggccgccgcccaagtccagctggtgagctggcggatgagcgacagcagcagcaacgtacaagattctccctcgcgagacgtgtttgagcgtgcaggtcagcctctttggctggcttttgagacggcggccgatggcgacgggctgcccggccgaggagggcgatcgacgctgggcacacgacgctgtcccgacctcgctcctgtgctgctcaatcgccggccgcggggaggagcgagcaacggtaggaagccgaccctcgccactgcctcgcttcctatcacccaaccaccactctctccctctctcttcgcccgtcattcagtcctttgcccgccgcccgctgctgctcgccttcgctccgaccatcagtctccgtccctcaaccctccggacgtccttcagcactcgccccgccgccatgtcgccctccagcacgccctcgcccgagatcgagtcgttctacgacctcaaggccgatctcaagaagtcgacgctcgacttctcggagcttcgcggcaaggtgcgtcctcatcgaggagaaggagctcaagcggctcgacgttggctgacggcaccctctctgttgttctcgctcctcgccgatgctctttccgtacaaaccagacggttctggtggtcaataccgcgtctaattgtggcttcacaagccagtacagcggcctcgagcagctccacaagaagtaccacgaccagggcctcgtcgtcctcggctttccttgcgtgcgtctccctcttgctttccttccgcccactcctccgacgtaggttggagttcgcgcactgactcctctcacctcttggcgctctcagaaccagttcggcggccaggaacctggatccgaagagcagatcgagtcgttttgccaggtgcggttcgggcacgttgatcgcagtagtcaccccactcacgcccacgcctccctcccctctcaggtcaaccacggcgtgacgttcccacttgcaaagaagagcgatgtcaacggcgacaacgccaacgaggtcttccgcttcctgaagcacagcgcgcccggcatcctcggtctcacccgcatcaagtggaactttgagaagttcctcatcaacagcgacgcctccgagatcaagcgctacgcgtcgagtgcgtattgaccggccgacatcgtagctcgcaagagcgcttagactcgaagctgacttcttctcgacatctccctctcctgtagccaccggtccgtcctcgatcgagaaggacatcgtcgaggccctctccaagaagtagggcgggctcgacaactgtagcatacctcttccctcgtttgacccgctccgcccttcaaccgcaacgcctccatcctcgctcagcaacccggaatcgtacagcccccccttgctctttacttgatgtccttttacgacgcaatccggccgccgctctgacttcagcccgtcgacgaaacagaccttgagcggtcattcatcacactgcttcctcttccatcaagccgaccactttctcctcgactgaacgccgggcagactcgtgcccctcgcgcgggtcggcaacatcgccctctttcgaaacgccggcgccggacggcgcgcccttggcagggattgggcttgccgcagagcccgacgggtcctttggggactgggcagagcccgtgttgagaaggccgaggggctcggtggtgctgtcggatggcgacgactgctgagcggcgagacgggccctgacggcgcgcgcagcggggtgccggcgaggagatcgtcagcttccggctcgttggcggcgggcaaagaacagacgacagacttgttgcgcttcttgacgacgagccggatcatgcgctcctgctcgcccggcgttagctcttgccagttcgtgatccgcgagagcgtctgcaggtcgaggcgaggaaaccattgtcagcgctctcaagagctccgaaacgagggcggcggcgagggctgaacgtacgccgtccgtattgacgatcagagggccgagcttgtcgatcttgacgctctcgccaccgacctcgagcacacgcggctcgtcctcttgctgcgatccgttgtcgcctagactgggtgcggggagggcgagcggtgccttctggtcgtcggcacccggcgccgggacggcctggccgtcgagcgtcaagggctggcggccgccgtgaccatacagttcgcgctttgcgttctccgccgagaacatgctggagagggtcttcttgaagaacagtggactattgggcgtctaagggaggcggttgagaggacagctcgtcgataggggtcacggatgagggctgacaaggtacggctgtcgcttcggagagccgagcgaccttcgcctctcaccgtcaccatcgctcgactcgaacgcctctctcgcctccctacctgctccaaggtctcactgaaggcaagctctggcacaatctctcttgactcgaccttcgctatccgcccggggcaagcgatggaccggctccagctcgtccgcgagcagatgaggtcagtacaggcgcgcctgcccgaccacctcggcctcaagctcgccaacgttgtcgtctactggagcctcgtcgccttccatttgtacaacacggtatgtgcgggagatacagaggagtgctgggtagcgaagtacctgcgctaatgcagctgcccctgttggctcgtctccagttcctctaccaccccgagcttcccgccaaggagacgtacctctcgccagggccgtacgcttactgggtctggtgcgtctccgagctttacgctcgcaactagagctaaaaaagcggaccgctgactgcctccttacccaggccgctcatccatctccttctgctcgggttcaccgtctgccagtggatcccgcgagcgtgagtcgggcccgccgcgcagcgctcccacagcacgactcgcattgcggcatcagcaggctgagacccgacgacctttctgctgcagacgctcgcttgtcatagagagcataggctaccgctttaccgtcatcggtctcatcagcgccgtacgtcctccggcctgaagggtccaagccgattgctgcggtacgtctgacactgcgcccttcccgctgtcaggcctacctctactttcagtaccgccggtggtacatcttggcgttctttctctcgcttgcgctccttgccgtcgtctccaaggttttctacatcgtccggactcgacgtcgggtcgggcccgagccgacgcggttcgaatgggccgttaaggagacctgcatccatatgcccttctccttctacgtacgtcactcacctctccgagtccgtttcactacacgcctgacgctgactccttcttctactctcatagcacgcctggagcctcgtcttgatgatcctctcgcttgtccaagcgttcggcaaggacgtccaccgcgagcacgccggcggctggacgcgcgtctttgtctggctcgctctgctcttcctggtatgtctctgagcgtggccacttttgtgcgagactaagtgctgacaagctgggccactcagacgctcaactcgatcggctatgcgtacgcctccgagctcggtgatctcgctggcacggccgtcatcgttcgtcgctgattcctctgcggcatcctagcctactgagctgacgaaagaggcctcccaatagacatatgtcctctgggccatcttcgagcaccagactgagatccacacgatccgctggagcgcgcttgtctttgcagtgcgtctcaaagtgcgtcacctccaggcaacaagaatgctcccctgacgcatgatgtccctctccctattgcacagatcttctcttcaatcgccttcctcatgacgctcaagtcgtcgctcggctacctgcgtccgataaaaggcgcgggaaagcagcccgaaatgcgctcgccgacctttaccgtctcgactgcgtcgccaacgcaacctgtgcgccgacctcgggccgggaatcgcacgcgaagcgcccaagggacgagcccgacaaaaaaggcggctggcggtcggtcgagggctgcgacggtggctgcgccgggcagaacgggcagctccggcggcgctgcgagcgctgctgctggtggctcactcagccgagctggctttggaccaccgccagtcgctcggcgcaagatctcaagcgcttcggacgagcggacgcccttgctccggcgggtgagcgagagcggcgctgcgcggtgagcgaagcgacccgccggacccccagacgaatggggcgggtctcgaccctggtaccacgtgcttttccctctgcatctgccgcgcgcattaagaacctgagaaagagatagaggagggagggttcgggccaagagcgcttgacgtcggatcggagggacgagggcgcggcggccagctccgaaggacgcgtcaccacggaacctcgccgacaggctcagctcgaacctccaccgcaaccacgaccccctcctcctttatcgaagagcatcgtacacccgcctgcatctcgactcaagccgatgttttcctcgctgcccagctcgctccagtcgctcttcgcccggccgcccggccccctctgtccaggcatagctcaacagcacctcgatgagcctctcgacctgagctcgatcccgcttgctgcccatccgggcctccatctgctcaatagcgactggaactcagctcatctctgtgcccaggcgcacgagggcgagcagtcgggcatctttgatctgtggcatgccatcgctcataggacaggcacgtcccgggcccgcagcagcaggcgccgtcggccgagctcgaggagaacacaaggctgaccgttggaccctcccttcctcgctctctttgccggcactcaagagggaggcgaagagtactggaatgccaaatattggctctccagcgtttcgcatccgcaactttcgaccctttacccggccaagtcgctcgccggctcgcgcgcgcaagcgaaggaccgggtcgacgcggtcgaggcctgtgtcgtctctagccgtggcgacgaggagcacctcaaggcggttgtctgggacgtgcgtacttctgcgatttcaagagggtgtcgatggaggccgggctgacccttcctggtacgtctggtctgcaggagatcaaggcgctgaccgagtggtgtctggcgcacggcgagcggtcatgacctgctttcttgccttctcgccaccttgtaccaatgatttctgctcaggatcggccgcagtcgtcgccgatcggctcagttcaagccgtcgtgagctttggcgtcgggagcgaagttacgagcagcgggtgtggatcgggcatggtcgccggcatctaaggggaaggcaccatacgatctgacgctcagcaagtccaatcccacccgtcctcgagtatttttcctcgcgcttcgacacctcggcccgtaagacagctccccattcggacgccccaccacgctcgagcaaggaggccgacggcgtttcgggccgacagagtctgcgtctccatcgtgctgatccagggctccatcgaggcgaggtaaaaaaagggctggcctgggaggggcgtgatgggcgggaaggttgttgttggcggcaggctgcgcaaatgtgaaggctggtcagcggcgggaggctaggtcgagagagggcttcaagcccgaacgcacacagggtacgactgccacaccttcctcctcacccagcgcacccttccctcgccaaagacgctctcgagccaggcgtcgctccgctcctcctttgagaagatcttgacgacccactcgcgcgcgccgggcgagacctcgccgtgataagtgatgctctgaaaatcgggctcaacagcctcgcctgcgcggaaggcggcgccggtcgtcaggattgccgagggcggcgcgatagacgggtcgaggtggaagtaggccgggttgggggaggggcttgtcgtcgagatgagagtcgtgtgcagatggatgtagggctgccgcctgcgcaaaaagtggaggcaggtcagcggcagcgcatgcgccgggtggagggcgatgaggacgcacgggatggcttcggcggccgagtcgagcattccgagcagctcgattccgctttggtggaacgggcttgcaaagaaaatcgcgtcgtagacgtcgtcccctagcagccggccctggccgtcggtaacgcgcacggcatacttcggcttgccgctgtgagcatcttcgaagcctcgaattgagcggacggtagtgtttggccggacgtcggcgccggatgctgcgaggaagcgctcgaaaatccgccagttgccaccggtcacggacgaggcgcctgttgttgcgagcgagacggcggccgcgagaccgtgagcagcgacgatgtcctgagcgtactgcagaggcaaggcgaaagggccgtctgtcagctgaacatcggtgaggtgagactgagacaaatggcatacgttgactcggacaacggcctcgaccatttcgtcgacaaagcggcccttgacgtgaacctcgtctcggaaccactcttcgcccgtaaccgccgtcggctcgccgagaccaagccgctgactgagcccgtttaccgtctcccacggcccgttctccgcgatccagcccgcgctgtacatctgcccgaacgcctcgacgagattatcgacggccgcttgggttcgtgtcggagcggcgtagccgtagcgccagaggagcttggccttctcccaccagccaagcgatgtcgaagtcgtcaggacgaagcgcgagccgtcgtagagacctatgccgagcggatcgtgcccggccgaggggcggtcgtcgtcggcaaaaggaacgagggttaagttaaagcggtcgactgcacgcattaggttgcggctgtgagaagggtgtgagggagttatatacagtcgattcagtcgaatggaaggtgccagtcggatgatagccatatcgtcgggcgaaggaagacgcacttggcctcgacctggtgaggaaggagggcgtctgacctctggtcagctacctgctgcgctttcaagctgacgagcgaccctcgaacacgacctggactcacaaagatgctagctccgagctcaacaatcttcccctcgccgttattctcgccttctccgcgagatccatccggcccatagggcctgacggtcatgctccttcctccgacccggccgtctcgctcaaagacgacgagctcgacttcgccctcgccctcggtcgacctggcggctcgctcgaggaagaaggccgcggccgagccggatgcgccagcgccgatgacggcgacgcgcttgagcttgccgagcgcagagggcggcgtattggcatctgctggaggaggatggacggagagcggcgggatgagggtcgctgggagggagccgagcgaggacgtctgcgagccgtggttgcggaggaacgtgcagagagccaggacgaggccgagtccgagcaggagccgaccaagagggagacctggcatggcgtcaaggaaaggctggatgcggtcgatgtggttgagagcgagcagacgatgggccctcgtcgacagggccgccttgttctcgttgcagacgactgcgcgcgggctgggcgactcgaagcggaacgaaggcaggcaggctcgtccccttgctcctatcgacactcatcgcccatcgcacgccctcctccaagcctcttttgaacacccttaccttcctttagcctcttcctccgatggtcagtccagggtgccgctcagcaagagtagcgatcgaggcggccgccgcctgacgcccctctgctcgtgcctcttgcgcgcgcgctcgctctgacacgcctccttcgacccttccgtcctctggcagtccaagaaggtctccgcgagcgagcagcggcggctggtcgaccagctccaagctttcacgcacgccacgtacgtcccagaccgtcgaggcgtgatggtcgcctggcgccgaccacctcctcgagacgctgctcaagccgcgagctcgcgacgaagccgtgcgttgaccaccttgcccttcgttctctcctccttctttaccttcttctgctcgggacacgcgcaccacctcgatatcgccattcagccctatcgatgcagcccggttgctgaagacggccaagtggaacctcaacgtcgctgtcgagctcttctttgacgacgacgccgcgcaggagagcgctactgcccggtcgggcgccgaaggacggggtgtccgtgaggcgcgcgagaagaagctgaaagcaatctttgacgacttcaagggtgcgtgcgctgctgttctgcagcactcgctgcgagcgagctcgtgtctggcgtatcgctgacccgtcagctcgctcccttggcaatcgcgcagacccggacggcgatgccatcacgatcgaggaggtcgccgcttactttgaggagattggcatcaccgacatggactcggacgttgccgtctatctcgtttcgtttgagctcggctcgccttcgatgggccggctcgagcgcaaggcgtttatcgacggctgggcgaaggccaagtgcgttgctgcctgcgccgtcgacgctcgtcggcctttaccacccgctgccaatgacatccgcttcctttcttcgcaggatcgagtcgatcgaggacatgaagaaggagctgccgaagtggcgcaagcggttcgtctcggaggcggcgtacttccggcaggtgtacaagtacgtttatgacctcggccggcaggacggcgccaaggtcatcggtaggtttcgtttcgcgttcgatcgagtcttagcacgctgtggctgacgacactgtcctctttccactgcagaccgagcaacgggtgagtctcctgcgtatctcggtcgcttcatagccgaccttgaattgaaagcgggctctgctatactccgccctcgcagccctcgccttctggcagacgcttctcccgcccgtctttgcggccgagccctcggcactcgcttcggcgacctcgaacggtacgccggcgatgggcttgcgcgagtttggctggtggtgcgagtttctcgaagacaagggcgtcaagggcgtcagcaaggacgtctggaacctcgtacgtctgcattgagctgctgcgctcttttgcgctgcagtcgaattgatctctctcctgactcttgcagttcatcgagtacgctgtcaaaattccgagcacctacgagacttacgacgaggagggtacgtcctccctttcaccatggaccagtgcctcttggtcatccttgccgacgcttcgttctgcctctcggcagactcgtggccgtcgattctcgacgagttcaccgagcacgccggcgcgcggcgcaagaaggagggcgacggcatggacctctcatgagaacaggttctgttccctacgcaagccgtcatctcgacctgatcaccaagacctttgcggcggacaaggtgtctcggtcggctgtccgctgcgcgaagcggatgacatcgccgggcgattgcgggtctgcgccgtcgagcgagagggccacatcaggcgacgggcaaaggaagagcatgtccccgaccgtccattccttcctcggcaagtcgggcttctgtgcgcctgcctttacatgccttttgtggtccgcatcatggctgaaaggttgaccggaaggacgcatggtcgagcggatggatgacaaagggcgctaagtgaagagtgctggagctagagccattatcgatgatgccaaatcggtgttgcagagcagggtctctgcctgctggtctgcgctgccgggaagtagctgtcgcttaaccgatcatgttgcgcatcgacgagtgcaccctggctgctggccgtccgcatgagctccctggcgccgctgcgcgcagatgggatggcgacggccatgtcgacatgagcgtcgagtagcggcggcggtcggcctcgattcaatagggcagcaagcggcgagcgttgcaacgaagcatagtgtcggagggcaagtgtgaccagcagaatgacgccattcagatctcacgtagccctttccttttctcgcaagcgcgctggccatcgtcgtccttcgccgtgtcgctcggcgcagccttccgaatcggccgccgtccttcaccgacgaacgaagaggaggcaggccaggacccaactcgcccgatcgcccagtccaacggaccaggtcgcccgaggcgagcagggcgagggcgagccctctcgaggacttccggcgacccaggggccggaacaggcgagcgagcgagcgagcgagcaacgaggtcagcgtcggaacggagaggtgaaggcgagcgagagcaaactaggggaggggggggggatgggagggtcggtggtgagacgttagcggtcgagcgagcaggtcgcggcagcgatgtaggatgggctgagacggaccctcgtcccggccaggcatgccgtctgtcatttccgagcgaaggaagccgggatggatcatacctacacgcgagcgatgggcaggcgagtcgcatgtcagcctaatgtaatgtcggtacgatccccttcctcggcaggccggtaggagcgacgcaccgacgatgacgccctctttcttgaggtcaaacgagagcagccggcctgacatctgcacatccatcacgactcgtcagcattcctggcctctgcaggcgaactcccccggggcgggagtgggggcagactgacgttagcagcggcctttgagccgtggtggccgtacatctggccgccctcgccctctgtccggagcttgatcgagccgccctcggaggtgagaaggatgaagcgcgcgtgcggggcaaagcacttgcccttagatctgcggggaagacagagttgacggccgcaagcagaggtgggaggaagtagcggccggtcagccgatgcaggcagcccgccacacctcgaacctcaacggccgacgtccgacgcaaggaagttgggggagggctacgcacagggcagaggcaacaaagacggggccaatggcgcagaccttgtacatgagctcctcatcctcccacttgggctcatcaaacgtctcgggcttgaggactccagcgaccaagacaacgaggtcgaccttcttgccggcgaggccctcgacaatcgtctttccggcatcgggcgtgccaacatcgacgccctgatgcgcaggttacgcgttgaaatgggcgaaagaggaggtcgtcagatcaccagctcttcggtcgtctcgagaggccaaccgctccatgcgggtcgaagccgccagcgctctgcagcgagctcgagcccagcgctctggtgcgcttgcagactctacctgtaacacggggggacgcacctcgatcacgtcgacgctcttggggaacgtgccctccttgacctcggaccggacggtggcgacgacctcgctcccgcgccggacgagttcctcgacgagggcgagcccgagcccgcggctcgcgccgatgacgagtgaggtcccgatcgggccggacggagctggcggggtcatgctgtgcttggaatgggactgggtagtggatgggtgggctttctggctgggagggagagcgcgctcgaccatggggaaagggagatgggtgtcgggagggtcgagagggcgaggtgggcttgagtgccggaggaagccgacggctggccatcgacaagtactcgcgtcatcacctgcagcaaaactagcaggtgctggaccggagcacctcaataggatgccaggagatgagtaggcaagcggacgactaacgaacagacgctggccgaggcgaagggtggcctttgagcgagctgatgacctcttgctgtgcagaagctgctgcgcggcggcccctcaggagcagccctgactcgcagcccgtgttcctgcagcactcaaagggaagcagaggacgaagtatgagagcgccccctctgcctcaggagcaaactgagcaggccgccgtggagcgaggcgcaatctcgtctggcaacgcgtcggtcgcatctctgcctactgcccatgcgcgtgccagtagttgtcagccgtcgcccctccggcaaacctccggagtgccatactttgtcttttcccgacccgagacatgaccctcggccggaagtagtgctctgccctgggctctgttgcaaggtccgctcagggctggggcgagccggagcaggcgtacctgctggcatagcaaccgatcgcctctcggcgcggcccgctcctccccgcgcgtttcgggtgtcgtcccgccgcccgaccaccgccttttctcctgtcaacaagcccgtcccagcggggagatcgcctgcccgccgggcaagcgcttgaagagctgacccggctggcgcgagcacactcgctcagcaaggactctgctgctccttcggcggccgaccggcgcgcgtcttgcccgagaccgacgggccgctgcttgtggctgcttgccccctcgccttcccttgccccggacttgctccggccactggaccgccttgcgctagctgatcccttgaagaagggccagacttcggtcttccgagctgatttcttcccctccatcctcctcacccggtcgccctcttctctctcgcccgcccacctacctccctcactcagcggccgcgtctctcgcctccttgaccccttcccctcctcggtcttctctcctcagccttcgccctaccttctcctgcgctcgactccttcgcccggcatgaagttttcgacttcttccctcttcgcctcgctcgcgctcgccacctcgctcgtctcagcctcgagctccgacccgtcctcctcgacctcacccgacctcgccgcccgcgacccggcaccggccctcgaggaccgaacttttggcaacctcggcgactggctcggcgacatcctcaacccgcagaacggccagtgcggcggcggcctcttctactggaacggtctcggcggaaaatgcgtcaagccgtcggcgtcgcacgcccagccgccgaccgacaccaagtcgtgcccgaatggttggagctggtcggacgacaccaagtgagtacctctccgctcggctcttgacacgatgcgcgacttggccccgagactgaccagccatcctcttactccgccttccaggtgctgcaagccgaacactaagaacgacgccagcaacaactggccgacgtgccagaacggcggccacagctggctcggcaacctcctcttctgcggcgtcgacaacttccagtgcgtctctccgccctcgtcgccactgcctcgtccgggccatcagctaaccctgccactccccctctcctccgaccgcagcgcctcgtcctcgaacgcctgcgacagcaagtaccagttctggtggaacctcggcggactctgctgcaagaatggcggctccaacggcgacgctcctccctccgacaagggctgcccggacaactggtactactcgaacaagtttggccactgcctgcctaagaactctggcagcaacccgacctgcaccaagggctcgtgggacgccggctccaagtgctgcaagctcgacaagcgcgacgagcacggctgcgactccggccgccagttctggtggggcggctcgagcatctgcatcgacaacgaccacgacacgaacgtccagtgccccgacaagaccaagtcgtgcccgaacaactacacctggtccttctcgcgcggccactgtgtccctaagaagccgaacgactgcacctggcagggcccgtgcgtcaacccgcagcactcgtggttcccggcgaacaagtggtgtgccggctcgggcccctcgcagcacaagcggtcgcctcggcggtcgagctcccttccctttggcgtcatcgactcggcccgctgtcctgagggcggcgtcgcctgcccgatcggccgctcgcgctcggccagcgccctgttcgagtgcctccagccagatgacgacctcgagtcgtgcggcggctgcagctcgctcggccagggcgccgactgcacggcgatcgccggcgcccgcgctgtcggctgcacggccggcctctgcgaggtctacacgtgccagcgcggctttgccgtcggccacgacggaaagtcgtgcgtcccctcgtccgagacgggctcgaccgccttcctcaccgcccaggcccggcacctcaagcgggctgccgccgctctcgcctaggcgcctcttttccgctttctctctcgttctctctctggaactttcctcgctgtttgctgcacgcctcatcctcctctcttagcaatcttctgggcttccttgctcaccactgttcgtcgctgctgcgcagcttctctgcccctgcaccttgcctcgccctctctatcccatacgcacgcaaccattccctacctaacgacgaccctccttcccctggcggtccatgaattcaaagcaactatccttcagactggcttcttctccgaagcagaagaagacagcgcaggcggcacattgttccttcgactaggtgtcctttgctccactgtcgatgttcgagccaaccgtcaaccgactggggtgagagcagggcagactggagctgccctagccagcgcacgtcgaggtccagcgacgccgcctctgtcccccccggtcggcgctgtcctgctcccccccgtcagcgctgtcccctccttctccctgcgcgacatgccgaggctgagcgaaggtcgtcatgcgagagagcggagagcgggagcggaagctaggtgctacatgggaggttaagtaggagacgcaagaggacgcggagtacgaggccgacggcgcactcagatgcggtccgtcgcatgatggtggccggcgaccttcgagtcgatcgtcgcggcaccggcgtgcgagccaatcgtgccctcggtcgcctggccgggcgccgatttcggctcaccgccgaagtgcgaatgcgtgtgcgacttgtctccgtggtgaaggccgtcgccggtgagcttgctcttgaactggtccatcgagacggtcgggaggacggtcgactcgtggacgatgggagccctatagggcagagcgagagcaaatttacgagtcagcggccgtcgaggcgagagcgacaaaagccgaaacaagcagaagactcactcgtgaatcttctcatggaccgggatgacgttgtgaacgactgagaaggcaaagcatctggtcagcagcagagcgaaggggcgcccagcaggggcgaaaagcgagagggaacggaaggacttacccttgtgctcatgcgtgtcgcgctggatgacgggcgtgatgtgctcatggacctgcgagacgggaaaggggcaagaggaggaggggaagtcaggcggccgacagagggagcacgagaggaagaggagggccgtacgtggtgcacggcgtgctcctggacggtcgcgccgaccgacgaggccgtgtgctcagtctggccgacggtccgcgtgtccttgtgctgggccttgagaccctcgagcagcgatgccttctcgggcgccatctcggcccggacctccttcgtcacctcgggcgcgacgaccgtctcatgctgctccttgaggtggaccgtgtcagcaaccggctggacgcggtgctggtggtggtgctgcgaggcggcgaacgaaacgaacgcaggtcagtctctagcccgtttgaaggcaccggcggcggcagggacgaacgatgtgccgctcgcggtcgatggcctcggccgtctcgacgtgctcatggccgatgaccgtctcctgcgtgacggccgggccggtctcggtgcagacctcagtcgagggcgccttgtcgtgggagtggaggaagttctgcgggcggcgagagagggagagatggcaggcagaatcaggcgtacgtcagcgtctagcgagcgggaagaagagcgagcccagagtgaagctccagaatcagcagcggctagcagaaggcacgcgcaccttgacggcgtccatgttgatgatggtagagttgtagagtgttgagactaagagtgggatggaagatgggatgtgagggtgagggcgggagaggagggcgtcgtccctcgaactctttgtagtccgacaccgcggcgctggcgcaccatcgcacgctcgcgcttcgctccacacgacgacaacgacgacgaaagcccgccgcggcctgctctgctggcagcagggtctagcccttcctgcctgccgtcgtgggacgggtcgacggaagcatctgccggtcgaggaacgtcatcgtcccttcaaaggcccgtccacgctgctagtcctgcgagacgacaggaagagcgaggctgcagcaagaggagcagcagctcaggcatgacccttcagccagcagcagcagccagaacaggacgaggcgagtgcccttcctcctttcgccagccaagaacgcacccgggacgaggtcccacagattgagaacggcggccgactgcggcccgctcggctggctcagaaagcaacgacgccaggctgagtcggccggaggccaggctcgccggcgttcgcagcccaccgcgcttgctgctgctgccagccctgctccctccatccaacccgaacactcccgccgtcgacccaaatgaagggactggcgctcgtcagctcgcacagctgaccctccgtttgctcctcctgcttgtgatttgggttggttccggccttgccctgtctcggcctgtcgacgagggcgtctgctggccttcccttccgtcctcgcagcccgacctcgagccacctcgttatctcgtagagcatccctggaccccccagcgtcaagagccgtcaaagtggccgccggcgtcctcgcattggatcagacctttgtccgtctctcgctccctcaaggcggccttcgttcgtccaggtgcgaggcgtgtcgcccccctgtcagcggccggaacctgacgggatcttctccctgctcaaccggcagggcccttgtcattccaagctcacctgattgctcgcctcggtcgctgacgcgctcgctccgggccactgccttgcccagaggcctcggtcgacaatgtacgaggtgctctcgcagggcttctgccagcccaggaggccacctcccgtcttgggcgtcagctgccccctctctctctcctgtcagacaggccgtcttgaccctcacctcgaggcttttctcacttgcagtcgacgtcgcccgcctctcgtcccgccctttctcgcgaggccgctcgacgtccttgcggatcctggacgcggccttggctggccgcccctcgccccgtcaccggccaacaaccgttcgcttcatcctttgttccctattctgctccggcggcagagcggcagacgagggaggatcctcgcttgaggccagtcgacctcgatggcggatcgagcactgcccgactcctcgttcctccttgctgctgacctagccgcccggccgctgacatttcgaccaagcgaccgacggaggcatcgcagcagtcatgggcaggggagggtgaaggaggtcgactgtacgtctacctgcgccacgctgcctacttggcactcgtcccctcgcactctgtcgaccccgacgccatccgtgcgactggccccgcaaatcacggcctgcaagcgacggtttgcccgagcacccgccgctgcaagcatcccaggttctgggagacccgaccgggaccttcctttccctttaacatatctaatcgatcgggcagacctgcccgagatgcgaggatgaattcctccagacaaggttcaagcctcgcgctcgaccgccggctgcgcctgaagccgccgagaaggagcctaagcaggaccgtgctcgcctcccgacgtcggcgctcaacaagcgctcttccgcctgcgccgacggccgaccggtgctgctgacagcatggctgctggctggctggctgcaggaccggcccgaccggtagttgtccgggccgggagaccccgcctcaatagctcgagagctatttctggcaaagagcaataccgcccgaccggcccctttcctgtccgaagggcgagcggttggaacgctctcgacgcgctcaaccgccggcggcgcagcccttcacccccaaaccctcagagcagcacacagtcgctcatccgccgacggccgttgaccgggcgggccgcccgtctttgcctcgcccgcgcgggccgggcgcgacatttgaaccagcctagaggactcgaccgcggactggcttgcttgaataggcgatctcgatggatcctgctcagctgctccttaaaaggcggcggggcagccggctggacgactgattgatcttcatctcatcccttcttccctactcctcaaaccctcccttacacctcacctctcaaactcatcatggtcgccaccaagctctcgctcctcaccggtctcctcgccgcaggctcggtcctcgtcgacgcctcgccggtcgacaagcgcgccggctgcaccatcacctcgctcgccgagtacgtccccttgcccctttgcttgccacgttcgatcctgaccagccgccgcctcttctctctcgcctctagcgtcactgctgccaaggcctgcactgcgtccgttcttctactgcacctccctccggcgcaacactccgtacggcagctgacgactcttttgccacctcccctcagcatcacgatcaactcgttcacggtcccgaccaagacgatgtttgaccttaccggcctcaaggccaacacggtcgtcacccttgccggcgacgtcacgtttgccgggggcgagttcgagaacggcatcctcttcagcatcgacgtgcgtcgcccgcgtgggcgtccaccaacggtctgtcgctgacaagctcttgttctctgatcgtagggcgagaacatcaccttcgacgggaagaaccacgtctttgacggccagggcgccaaggtctgggacggccaggtgcgcagtcacgctcactctgcaacgacgctcgcagagcttgacctccgaagtctttctctttctctcttcttctagggctccaacggtggcaccaagaagcccaaggttcgtctgcgtcacagcctcgagagctcctcagtgagacgaataactgacctgctcttgccaccgccccccagttcctccgcgttaccatgtcgggcacgttcaagaacctcaaggtgatcaactcgccccggcaggtcttctcgatcggcaacaagtcgaagctcgtcatcgacagcgtcacgatcgacaaccgggccggtgacaagcttggctcggacggcaaggagctcgctcacaactcgtgcgtcgcccttttacactccgctctagttacgctttgagctaacgatcgcttcatacgacctctccagcgactgcttcgacgtgcgccgctaccgctctgcaagtctccctgtgtgatgcggcccaggctgaccgccatccttcctcctcgcactgcaggtgtcggccaccgacacgacgatccagaactcgttctgctacaaccaggacgactgcctcgccgtcaacaagggctcgaacatcaatttcatcaacaacttctgctcgggcggccacggcatctcgatcggctcgatccagacgggcagcgtcgtcaagtgcgtcctgctgcgctcgtctcgcacgctaccttgctgacttgcgcccggccctccagcaacgtcctcatcaagggcaacaaggtcgttgaatcgacgaacggccttcggatcaagacgcagcaggaggcgactggtgcctcggtctcgaacgtcgtctatgacggcaacaccgtcactggcgcgaccgattacggtgtcgtcatccagcagggtgcgtcgagctccttggccagaggcacacctcaagccctgaccccgagagcgtctccgcctcttgcagactacgacaacaagggggcgtcgggcaccgccggcaacggtgtcgccatctcgagcatctcgtttaccggcgccgccacgaccgtcactgccggctcgaaggctcaggccgtcaagatcctgtgcgtcgaccctttccggctgtcgaagacttcccaggctgactctcccgtatcgcagctgcggctccacctcgtgcaagggcccgtggaactggtcgagcctcaaggttcggccctgacgctctagcttgcgctcgctgcgaacacctgctgacacccgcgctgcccattcaacagacgaccgctggtggcatccagtcgaccaaggtgcccgactcgctcgtcctcactggcgtatgtctcgctctcctggttagacctttcgcagagtagcatggctgactcgcagccacgaccccgcctttgacagtactcgggcaacttcaaggcctaaacaattctctgcttcttctgtctttacccgcgcgcatctcgctctgtccagcagcaagcgcgacgtatctgtgcatattcaattacccggttgttgttgagatttggtcggagccgggcaagcggaagaggtgagtcagggatctcagccgggctgcagcaaggccggcgctgcaggatctgcggcggattgcaccagagacggctgctgcgtcgctcgcgtcaaagtgactcgctggaggctgctcggcgagaggccgacgctgccgcggccccgtcgtcggccggcggccagcagaagcggcagacaaggccgcgcaccggccgccgcacgcgatcgaggcactgcagcgggcgagaccggcgcccgaagcgagagctctgctcctgactggacttctctcttgcctttgacactggcatctcgttgcagctcgttgcaggacggcgctcgcctctctgcgcccgagctgctggctcgctcgctcttctgctcgagcggtcgaaaaggaaagctcggggcggggaaggcgcgacctcggcctcgagctcggcgaccggccggccgcctctctaagcgattctcggctgacaacgctgcctgactgacccaccggagccgcttactatcggcgatggcccatggccggcccccgtgccgtgccgcaggcctcttatgagcggcttgactcgaacgaccgaggcttgaccttcttccctcaccagctcccctccccgcttagcccagcctcagcccagcacctcaagctcagctcactcctcggccatgttcacgagcccgcacccttcctcgccctgggcgacgctcgaccgggccgccctcttctacgccgcctcgcccgcctcgtcctacgcctcggacgacaacgacgacgcgaccgccgccgccttcaggaccccggctcagaagccggcccgcaaggtcgacgaggtcgactactttagcttccggccgcacggcatccggtcgccctacctgccagagtcatacggccaaatcgaccaggagggcgtctttgaccttgacgacgacgacgcccggtccgagacctcgtccttctcgtcgacctcgaccgccgtcgacgactggccggactcgccccaggacgccctcggcgccgtctttgaggacgacgacgacgacgacgtctctgccttctcgcccgtctacatcgagcgtgtccgctccttctcatcctcggcctcgtcctcgtcggcctcgtcggtccagacgccgccgcccgtcaccgaggccaaggcgcccgcggctggcccgcgcaagcgccactcgaccgcgttcgccttgaaggtcgtcggccaggctcggcggcgcgactcgttcgagtcggtcgctcttgcacagtgggctaatggcggcaaggccgacgttcggcccgacacgccctaccctttcatcgccgagtcgcccgacgacgcggtcacgaccctcttcaactggcggcgcgagtgaaaggccggtcgcccagccagtgagtcgcccttctccgcccggcagacttttcgccgaccttccgactgaccgatcctcttccttaatcttccagagtcaacgacgcaaaaccaccactcaacacgcttctctgagccaccctcatcggcctgaacgacgggtcggatcgcacaacccatgcaccacccacttcgccatcgctcgatatcggtcactcggcccactcgcgaactcgcgatcggctccaccagcgccgccccaggcctttctcggcgctttgtgacggcccatctgctcgtcgctgctgctggcccgctctggctgtacaaaaggcacaccgctcgcgcgcactctcgctccgcgcagccctcgtgcccgcttgcctttgcctttctcccgtccggcccgcagtgtaatctctcctgcctcgctccgcctcgcaatcgcatgcgtctacctttgactccttctcgccctaagcctcctgtttcgttttctgtcgtgcgactgagggctcgccgtcgtccttctcggcaggcgctctctcgcgcgtgcggggcgcagaaggggggccgcgcgtcggctccgacccaccgcgcatccccttgtccgcttttagaccctccctgctgcctgcgggcgacgaccgccgccggccggatgggcgggcaaagctctgctgatcgcaagggccgctgaccttcacccccgacggacgacgacgacgacaacgacgatggacgaccggcagctcgagatgcagacccagcggctgctcgaagacgacgggttggagttggcgcccttccggcagcagccgctcgacctgcacgtccctcggccaagccgcaaggtcaagcgctcctctctgacgcccgtacgtcctctctgccctgcgcctggctctagtggacggcgcgaggaccgtcgagctcgagctgagctgacccggctgggtgctgccctcgttccgagcaggcccgcttctgcatcggcttctgctcgctcgtgggcctcctcatcgcaagcgccatctgctacggcctctacagcgctttccgcttcgccggccggccgcacgcgagccatcatgccaaccagacgctcctcagcgaccccggtcgcggaaacgagctcgttcgaccgtttttcggcccgccggcaagcggcgcgccgctcgccacgttcgacctcggcctgctcgtccacgctcgctgggacgtcgagatggaaagcgagcgcaacacgacgaccgagcctggacgaaagctgactttcgtcagctaccggcccaagaacgcgagcgcgcatgtggacgtctggaggaaggtgctgtccgacggcgaggggctctcgatgcggcctttcgcgaccggcccctggcgcgagcttcaccggtcgatcgtgctcaaggacgtcccgctcgagacgcggccggtgcagacgacggtgcctattagcttccctcgggagatcatgtacgtcgcgattcgcccggtctgccagccatgaagctactctgaccgagctcgctcgtagccggtcgctcatcaatcaaactgctaaggcagaggtcgtcgcctcgttctttatgctcccgcctgcgggctgggagtcgtctctcctccgctcggacgacgcgcacccggccaaagtcgtgtcgacgcgagtccagctacacgacggccaatctctgaacgccgccgcgcggctcccgcctgtctggtcgtcaccgtcaagcgcagacgggccgctcacagaccttctctcgcgtgcggtcgcgtacgaagatttgaagcacgaccgtggccttttgaacgagacggatccgtggtcgcagacgtacgacgttcgctcgcgtgcctgggtcacgactccgcgcgactttgccgtctacaagtgcggaccggtgcgaaacttgccagcaggcagcagttgctgacgacatcttccttcagtctgaccagcttccgcgaagcgatgcgccagcaaaaggagcatctcgtgcgtctcgtttgctccagaagcggcacgggttgaggttgacagttaccgcctcttccgtccagcgcggcgcctgcaacgaaggtcgcgaccgtaagtcgccttcttgttggccagcttttgctcaatttggccacttcgagcatctcctccaggtcaacggctcgaccgaagcggatgcccggcagtggtacgcgccgtccctcatagccgacctcggtgaggccagcgccaaggactacgtcccgctgccagtcttccggggcaacgtctcggaagccgacgtcgaggacttcctcttcgactaccgcatcacgttctcgccgtcgtcggtccgcaagctggccattctccagcacgtgctgcgcaaggccattcaggaagcgaatatcgaggcgccgcggcacaaccagaccgattatgagcgggcgtccgactacgactcggctgagttctggaacgccctccgcgggcacccgtttgagcccggcacgcggccggtcgcccgcggcctgctcgcgtttgtcgctggcttgctcgacatgctcgcgccggcggtccaactctactttttccagacgcggtccgtctgagtggatcctcattcgttcacctggaggctgagcttcgattcactgccaaccccccctttcagaaccctgacgaccggcctcagcatgccagcgctcgccctcgaccaggccaacgacttctgctgggccttcatcgatggcttccgctggtacatgtacggccacgggcccctcgtgatctccctcggtgttgtcggcttcagcctcgtcctgatctgcgcggtcgccaatcttgcccttcggctcgagtggttgtggggcggcccgctcggctgggtgccggttagcatctcgcgtcgccgaccgacgcactctgagcgggcgagcgctcgagccgacgcaaggttcatctggcgcgaccgagcgatcgtacgtcggcccttcccacttccgaagagcagcgagggagcgtaagcgctgacggctcatgctctgcagttcttggccgtctgcttcctgctctacgcctatggaccctcgacaccgcagatcatcgccgcttcgcctccgtccgcgaagggctcgctgccgggttttatcctccaagtcacaccgtcgtcgtccttcctcagtcgaacgttcatccctctcctcggccccttgttcaagaccgtatggtggttcgcggccgtctcgcagctccacctcaactggcgcctaaagtcgtttggcgagtccaagctctacctggcaatgtgcttcgcaaaggcggtcctcaactggatcccgatcgtctttcacgcgcggctcggccgggcagagctcatggaggcgctcacgcttcaaggggcggttgggatgtgtgcgcatggcgcgctcgtctatcaggcttggctttacccttcggtccctcaggaggaggccgaggacgagtgagcgcctcccactcgctcgcacatagatttgacatttgcccatgccatctcatccgtccgagttgctgcgactgcgagcggaggaacaggggggatcatgcgatctccgatcatgcccggactggccctcccgcctcttcctgagccaccgcgagagcgagagcgaacccgccctcggcgctctcgacaaagacaggcgacggcagcagatgatgcttaaagccgtttgcgccgggcggcgagagcgagagcgagaccgtgaggccttccagccctgagcgtcctgcaggatcaggaggcgcaggaggtgtcgggaggtggagcgtgagtgggccgaccggccgagtaggcgcgtcgggtgcgtgttgcgcgtcgaagtaggaggttgagctgctgagggccgagaggccggccgaggagggcgtttggagaatcggaggcgagagggtcgagcttcgccggcgcctatgcattgtgcggggcgcgatcgggtcgtccgctgccggtcggaggaagggcgacgtcgctgggtcaaggtacggcgagagccggagactcggcgggacgggcgtgtcgaacgacggaaagaagagcggcgagatgcctgcgctggcggaagccgagcaagaggcggccgagcgggaggaggagggggccggcgcggtgcgcgagaacgacggccgaccgccgtgcgcgcttcgtgagacgcggaaggacgagcgtgtgctcgagctcgtagagggctcggccgggggtcgtgtcgggggccggcttggcctgcgagggagagagcgcggtcgagcaggagcgcgatcaactggaaggtggctagggacaaggcgataaggagacggaaacgtaccctgttcgggacgagccgttggtagacgagtggctgagggaccggctgcgagcctgctgattgtcggcagcggcagagagcgagcccccggtaattgatagacgcgagctcgagcttccttggatagaaggcttgggcgaaggaggaggcggcatgatagcggatcgcacgtgctgtgagggaaaggcggtcgagcagctggtcgtcgaggagtcagcgagccatcagctcggcttgcccgcagctagcgagttcttctgggctgccgccggcaaactctgtctccctattatcagcccgcgcaggccgtcttgcttggtcgagggcagggtgaagcgagcgagggtgactgctagcgtgaagaaggccggggcaccctcttcggccctgctcggacggcccgaaaaggggctggctgccatcggcagatctgctcctctcggttgagcaaggtcaggcaaagcgggcacaagaggggatgtaccgatgtcgttcgcgtcagttctgatctggatgacctcgtccaaattggaggtcggctggccttgtcgtcgtcgtcgtcttggccgctcgttcgttcggctcggcggccgaagccaaggccgcttctcctcccgccctcctcatccatttctcgctctctctctctcttgcacacacagcccagtcctacatgctcgtcctccgctcgacatccacccgcctcgtcctcctcagctctcgtgccgccctctcccggccagccttacgctcagcatcgtcgacgccaatccaccgcgcaacgcatctcgcttccacccgaccgaccatcgccgcccaacccagggcgttcgcctcgaacctccagatccgacgaacgatggcgagtgaagctcaggtcgagaaggatgccgaaggtgagtcccggaccagacagcgcctgcgaggctcagtcggcgagagacacttgccagcgggcgagagatggcgcagctcagcagcagcagcaagctgacctctctctcctctgcctccgccaggcgccgccatgccgcacgagtcgttccctggtgcagtcggcccagccgcgctcgacaagctccgggccttctcgacgtgcgagatctcggacgcgctcatcgcgctcaagatcccctccggaggctacattccaggcgcgtcccgccggctcgccagtcgaccgcttcttcaccatctcggccgctgatcttccatcctcccccgaacagacctcgagcagttctcacctaggcttgcgtcgactgacgatgacgccaccccgtccttccggatcctcggcccggtctttacggtcgagatggtcgactatgccgacacaaccgctccgcggccctcaacgcactacatcgacgccgccccgccaggcagcgtcatcctgatcaagacgccgctgacggcgcgctcggcctgctggggtgggctcatgagcacagccgcccgtgcccaagggcttgagggcgtcgtcgtcctcggccggatccgcgacctccgcgagcaccggaccgtcggcttccccgtcttcgcccagggccactcgacgctcggccaagcgcccttcacgcggccggccgtcctcggccagagtctgacgatcgacgttccgcatcttgcggaggggacgttcaccgtccacccgaccgacctcatcctcgccgacgaggacggcgtgctggcgatcccgagcgcgctcgtcgagcaggtcattgagggcgcggccgagcggcggcggatcgacgagctctgcgcgggcgacctccgcgagggcaagggcgtcaaggagacgttcaaggctcgcaggggtggctgagccgctatttgagcggcagagtcactcctcgaccgatcctcccgttgtacgctccgtcagtctctcttgcatgccgtctgcctttgtaagagaagccgtaagattcgtgaagagagagagagagacagcacgagaggagtacaacgcggacaagtaaagaccagagaaccgaaggaaacgaggcagactaccagtcgagcttgcctccgctcgcgccaccacaagcgacgaccgcgccgccctcgccgccgcacgacgacgtgtgccggcccttcgtccggccgacaatctcgaggtcgctctcgatgatggcggtcgccgcacctcggcccagagcctcgctcgccgcctgcgttaccatccactgcgagatgaggagagaacggaaggtcagtcaacggcaagggggacgatttacggctttgagggaacgcaccttggacgtgctgagcacggcgtcgaggtcggcgacgggcggcagccggataaagagccctctatcttcctccttggcgtcaaagctgaccggtcgttgagagaggagacatgggtgagcaggtcggtcgaagagcgcagacggtcatcgggcaacgcaccagacgatcgagctctcccggtcgtcgaggcactcgcctccgtcgagcgtgtagcgcatctttgtgagcgggcaggcgacaaatatgcggccctcctcgtcgtcgccgacgatgccgtgcgagagcacctgggcccgcttctgcgggcacatctgctgcgtcgcgtagaggccccggccagggacgtcaaagagggcgagctgggtgtcgccccacttgagcgtcgccgacgtgacgccctcggttgagtcgagcaagtcggaccggtttgcgacgcgctcccacgcccacgagtcgaccggcgtcgcaaagtcggcgcgcgagaagaggaccgccgggaagcgctcgggccactcggccggccggaactgcgaccgctctggcacgcgctcgacattgtcgagcgtctcgtccgtgttggcaaactgcttgaagagcttctggcgctccgtctccttgacgacgcctgcagaaggtagaaagtcgtcagcgcgagggccttcaactgcagacaaccgagcgagaggcgacgcacgggcccactcgtcctcgtaggtcgagatcagctgggccatcgcctcctcgagcgcctggcagatgccgagctcgtcgtcgaggatgaccttgcggagcttctcgataccgccctccatgttctcgagccagcgcgccgtccgctgcagcttgtcggccgtgtagatgtaatctgaggggagaggagcaatgtgtctggcgggtcagaagagacgcccaagtcgattcgagaacgtcggacgcacacatcaggtaccggtcgaggatcttggtcaccatcgtcggcgggacgtcggccgcaaggagcgaaccgtgtcgggggatggcaccgccgttgccggcgacatagatgttccagcccttggcagtcgcaatcagcccaaagtccttcgactgggctggatgggtttgaggttcacgtcagagtcgagtttcgcagactggctcgagaaagtcaagcactcaccctcgccgcactcgcgcacgcagccgctgaggccgcccttgaacttgtgcggtgagcggactcccttgtagcggttctcgagctgaacggcgagcccgaccgagtcgccgacgccgtagcggcaccagctcgagccgacgcacgacttgactgtccgcagcgacttgccgtaagcgtggcccgactcgaagccggcggcgccgagctcggcccagatggcgggcaggtcctgcttcttggcgccaaagaggtcgatgcgctgaagacgcaaagggccggatgtcagcggcagtccttttcaggagcggacgaggcagaatgatgcacctggccgcccgtgatcttggaatagaggccgtagcgcttggcgaccgtgccgcaggcgataaggccgtcgggcgtgacctcgccgccctgcatacgcgggacgaccgagaaggtaccgtcccgctggacgttgcccaggaacttgtcgttcgtctcttggttggggtggtgagcggcgtccatgacgtgggccgagatgccgacggtcgacgagagaatgttgccgatacaaggctgagccgaagcggaagtctggtcaacttgccctgctcgtcacgggccagccggacgtgacgcaccttgcagatctcgcagccgattgccatcttgcgcacgccgtggttctccatcacctcggcaaacgtcgtgtagcccttgaccctgtcgtcgccggggcgggtcagctccagtaggcaaagaaaggcaaaaggcggaaaaaacgcacttgacgatgttgaagaggtcacggcgcgagagggcaaagtgcgtgcagaggttgctcgacaccttgagcccggccttggccatctcgctcttgaagatgccagtgatgagcggcgtgcagccgccgcagccggccatcgccttggtctgcgtcttgatgtcggccagcgtcgtcgcgcccttgttgcggatgcagtcgccaatgtcgcccttagagacgttgtggcaggagcagacttgcgtgtcgtcgtccaggtcggccccgtcgtcgtctccactcttagatccgacgataaactgggcgggcggcatgtcaagcggcttgcgcttcttggtgatggcgacgagctgcgaaaggtaggagagtggagtgttagcaagtctgtccttgaaacaaagcggcgccctcggtaagccgcaccttgacaaagtcagagcagtcgccgaccatcatgcctccgaggaggtgcgtgccctgcaatcatcgacgtcagcaaaagcgcccatagcagctggaggcaagaggaaagggacccacgtctcgcgagaacaggtacttcttgtaggtgccggcgatagggtcgcggaagacgagcgacttgatgtcttcatcttcgagaggggccgcgagcttgatcttgcggccgtttcgcgtgttacgctcggcgaggtgccgaacggcgccgtcggcctcagcttcgacctcgatagggaccgtccgcgggaccgtctcgacgagcggctggcggcgctcgagcgaccggtctgcgaaaaagtcgccgaatgacgcgacgtcgacgcccatcagcttaagcttcgtcgagagatctggatggttcatcttgcggggggcatgcgcgcccatcttggtgtcggtctggcacaggttaaaggccaggatgtcggccatctcgactgcaggcgacaggagaggggcaacaagttcgtcagccccgttcgcgtgaccacgcccgcaaacaagtcggagcagacggacctccgggggcaatcaagccgtacgtgttgccgcgccacgaggcacattcgccgatggcgtaaatgtcctgcgcgctcgtcatcaggctgtcgtcgacgtcgataccgcctcgtcgggcgatgctgatgcctgaggcgcgggcgaggtcgtctcgcggggtgatgccgacggccatgacgacaagctcagcctctgcggggaagattggtgggtgggaagtcagcacaaccatcaaggcagaagccgagccagatcgagaggcgtgacgcaccgacgacctcgccgtcgtcgaactcgaagcccttgaagacctcctcgccaatccctcccggtgcaggctcgacaatcatctccttgacgttgacgttcgtgtggaccttgacgcccagggcctcaatccggcggagaaccatctcgcccgccgaggcgtcgagctggcgcgagagcgggtaggcctgccggttgatgatgctacagagtcggcaactgaagtcagcagcggagcgagcgacaagcagacgccaaagagcggcgtacgagacgtccgagatctcctccatgtcgtaaagcgccttggccgcctcgagcccgagcaggccgccgccgacgacggtcgcccgcttaacgtcgtctcgggaggaaaaggagattatggcttgaaggtccgcaattgacctatactggaaaattccttgcgtcttgcgcccacgctcgaccgagcagtagggaggcatgccggcgtcagagccggtcgcaatctggaggggcgcaggcgtcagctgaaggcgtcgcggcgcgaacgaactctcggccgcaaggacgcacgacgcagatgtcgaactcatagcgcgcgccagtgtcgacggtcgcgatcttgttcacagtgtcgataaaggtgacctgctcgccgacatggaactcgctagagggcgaagagagggcaggaggtcagcctcgggctgtccattgcctctcgcgcagcggccgttcacgggacgaacaagcggccctcctcctgggcggcgtaccactcgggctggttgaggtaaaggtctgcaggggagcgaggcgtcagcagcggctttcacacgagatggacaaggcagcgcaccctcgaccttgcgcgtgatgaagaagtcggtgaggccgactgcgagagccgagggcggcggtcagccgggcgggcctcgagatcttcgctctgaacgacgacggaccgcggttgtaagcgaggtgcttctcctcctgtcggtcgaaagcgagaggtcagcaccttaggcagacgagagcagaaaaggagagaaggggtcgcacgccgcaggtgatgatcttgtagcggccgtcttcatcggctttcaggaccttctcgatgaaggctgggagaaggacgcggttcggagggacgaagccggtcagcagatgcaagtcgcggcggcggcggcgagccaaactctggccgaggcacgcaccgattccgcacactgtcgacgacgacgtccaagaagcgggtcagctactgacaagaggttggaggccagctggaggcaggcgctactgactgccgagaccgacgacaaagattcgcgttttgcgttcttcgagctgcggcgccggcgcgacggagggcgacattttcggggcgggcggggctcggcgaagagcgataagggcggcggctgaccaaggggttgagagtcgttgggaggagacggactgcagggaaggtaaggaagggtacgaggaggaagggaggcgaggtgagtgagtgtcgagacgaaggaagcaaggtgagcagaagggaggacgagcaaatggcttgatctcctccaatggacgggcctccgtctcgctgacgccccccgggccgacggccgccccgccagtagccctatcagccgcaatcattcccaaaagattacaccgggttgtcgatcgtcctggatagagatggccgaggatccagcctaaagtcgctggctgcccagcccctgccgacgggctcggcgtcgacgggcgaaacttaccggcatcgagggcaagaagcgccctgctcgctgctttaaaagaggaggaccaattgataaactgaggtgagttatctcgacgacgatcggttcggccgcatctcctccctcgtcctctcaaagacgagcgcactctcgctcaccgacccttgtctccatccggccttcgtacggaacctcattcgcctctttctctccagctccagctcccaaccatgtcctccaccatgtccatcgacggcatcgaggtctcgcccattcgccgcgaaaagtccagcgtcttcacctctgccggcagcagcgaggcggtctcgagcggccctcagccgcaccggtcggtcgcctacatgcctcacgaggctccgcctttccgctgggcgtcgctctgggaggacccggtcgtcaaccccatcaatctcaaaagctatacgctgcgtgagtcggtcgaactcccttcgtcgttttctgaatcctggtcagggggcgttggtcgatcctgggctgacttgtcgcttcccgctccagctctggcaaattttaacaatccgtacgccgcctcttttctcctcctcctacttccctaacattgtcgctcgctcggtcgtcttttgttgtaaccataagatacactcggaactttcaccttgcatgggttggcttcatgggtgcgtggaaggtctctgttgcaattcgcgagctggggagcgcgctgaccatctccgatctcaaaagtcgcgttcctggtccgttccgctttttcacgtcaactttgaggcaagcgctgactgctcctccctccttcctccctctccccctctcccccatttaccactagtcatggttcgctttcccgcctattgcggatcctatcaagaaggacctcaagctcacgcaggcccaattcggcaattcgaacagtgcggcccccttagtcgcgatactcacagatccttacctgcggttgctaaccttcactcttggctccccttcccctcacgcttagtcaccgcactttgcgccactctcattctgcgagtcatcatgggcccgcttgtcgaccgcttcggcccgcgcaagacgatggccgctatcctcatcctcggcgccattccctcgggcctggccggcacggtcacctcgtacgagggccttctcgtcctccgcttcttcatcggcatcctcggcgcctctttcgtgccggccttgtgttggagttccgcattttttgacaaggtgcaaatgaaccgtcgaagcgtgcgagtgacccttcgaagatcaggctgacactcgtccgctcttccagtcttgtgtcggcacggccaacgcgctagtcggcggttggggaaacatgggaggtgcgaatcgtctcctttccctcccctctcttcccctaccttccttctgaccaattgatctgcctcctcggttgggggggcaacaggcggcatcacctacatgatcatggtcgcgctctacgccaagcttcacgagacactctcgcagcacgttgcctggcgggtctctttcgtcgtcgtccccgttccggtactcttgtcggtcgccgccgcgacgctcatcttcggcaccgaccacccgactggcaagtgggccaaccgacacacgatgccggcgaccgcggctgccgtcatgcgcggccactcggtccagctcgacgctagcgagcaggccgtcatcgacgagaagaagaacaagccgacggccgacgtcaacgtccaggaggtcaacgacgaggacgacgcacgcgaggaggcggccgctgccaatggtaccgacctcgacgtcgctgtcaacgaggtcctcaccctccgctcggccacgcgcatcctcgcgagcccgctcacctggctgcccgcactcgcctacatgtcgacattcggcttcgagcttgccgttgactcgaacctccaccacgacctgcttcagacccatcccggcctcggtcagctcaacgccggctaccttgcgtcgatcttcgggtgcgtaccctccttcatttgtgcacatctcctcatctgacttcgctttcttctcgatgcagcttcctcaacctgatcacgcgtcctctcggcggcatccttgccgacatttgctacaagcgctggggtgtcaactccaaggtctacctcactctcatcctcggcgccggccagggcatcttttcgatcgcgatgggcttctggatccagaagtcgagcgacccgtctctcgcaggcatcatgatcttcatcgtgatcatcggtttcttcaacgaaatggcgaacggaggaaactatgtacgtcctcagtcagcgttccctgtcttccatcttggcgctgacaacctcctccttccgcaggcgctggtgtccgtccctgccgacttttcgcgctccttccttctcgacgctgacagtttctccttccgcagcccccacatcaacccctctaacaacggcgtccagtcaggcctaacgggcgcatttggaaacgtaggagggatcatctttgcattaatctggcggttccgcggctccgtcgccggtgtcccctggtggtgtgtccgacctgctgttgaccgacatctgcgccacactgatttcaactctcccctacacaggatctccggcattctcgccctcgttatcaacggcctgctcttctttgtgcctaaacccaaggcgtagaggctgctgttttgcttttcattgtcgcaactgtgccttcatccaagccccttttcttcgcgtcccccgttgtatcagcccacccgcccgccctataaatgtgtcccttccgccgcaacgtccactggcgagagcttctcagagtcatgttcagcagaggtgttccgacatttcgagcgaaacaaggcttccatctcgcccaccgcttaacatagtaatcgcaggcatcgaggtcttatctgcctgctcatcccgctaggctgcgcaaaatcggccgacatctccccttcaagaaggcctcacctctttctttcagcagcgcttttcggcgagcagcgtcggctgccctggacgctcgtcctgaagatcattgcggcagcccgggggagcaagggctgcgatgggctgcagcggggccaaccgtatcgtcggcttcttgtccgcaaactgcagagataggggatgattaaggttcgttcagttagtgccgacggggacagagagttgcttggccggcgggtggcggccttgtgtgcggggctgggtccgctggaggagatagggcccctctcgcgataagctcgactagaccggccagcaagaggtgcgaatgcacggctgctggctggctgctcgtcaccgccttcctcgacgctcgacaagttcagtctggacgtcagcagcacctctccccaccctctccctgcctgctcgagtttcctgccccagcctgcccgcccgtcaagcatgtcggcctccgcctcgttctcctcgtcctcctcgtccggctcctcaaccggcggcgccagcacacccccatcgacggtgccgacctcgcccgacctctcgaaactcacgctcgacgacccgttgtcgacatcgcctgtggaagaagggacgtacaacctgccggcctccttacggccgcgcgacgagtgggccgcgctcgagtgcccgccgctgccggccgcattccctgccctgccaaaggtcaaggtgctcgccgggccgcttgacaagggcacgccagatgactggataccgcgcgactccagcctgatccgcctgtgaggatgtcgtcagcttgtcgagcgagggacacgagctgatgaccgtttgcgggctccgccgcgttgcctccgcaggaccggcaaggtgcgcgccgctgctgcttgcttcgctccctccgacactcactggcgtccttcgcttttcagcacccatgcaacgtcgaggcacccttgacgccgctttttgatgccggcttcctcacgccgagtgagctgttttatgtccgctcgcacggctcaacgccggtcgtcgccggcgagacgctcaccaactggcgcgtcgaagtctctgggtgcgtctcgttggcccgctctgccagagccatcgcctgacccctcgttgtcttttgcaggctggtcaagaacccgctctcgctctcgctcgccgacctcaagtccaaatttgaaactgtaaccttgcccgtcacgctcgtttgcgccggaagtgagtcggcctctggccaactgttcctgctctggtgacctcctgtcgctgacggcctgcggcctgctcttctcagaccgccgccgcgaacagaatgtcgtccgcaagtcgctcggcttcaactggggcgctgcaggactgtcgacagcgctctttaccggtgagtacgcggctgcgatggcgagactagcttgcgactgcgccctcggctgactgcttgagatgctgctgccgaccacatgctgcaggtgtctaccttagcgacatcctcgcttacgcccagccgaccacgtcagagacgggcgagaagcccaagcacgtcatttttgaaggcgccgacgagctgccaaagggtccttacgggaccagccaggtaagcagcaagtgtatcggcgcttctcttcgcgccggctgactcgacgtctggccatcgtccccgacagacgctcaatcggtcgaaggaccgcagcaagggtatactgattgcctggctgatgaacggcctgccgctcgagcccgatcacggttcgtcgccttgtctgcccaggagagcgctcggtccctgctgacactcgcgcccatcaggcttcccgatccgactcgtcgtcccgggtcagattggcggccgcagcgtcgtacgtcctccgcggttcggccagcgagattcgctttactgaccgctagccctcacgcccctcgcagaaatggctttcaaagatcgaggtgtcggccaaggagtcgcaacagtgcgtgacttctttaaccgccgcaccgcctgctactctgcggctaactccccttgcctgtcttgcagctaccttcacttctttgacaaccgtcttttgccgcagcacgtcgagcccgacgttgccaagagccagccgcactggtggtacgacccgaactacctgatcaacgagctcaacgtcaacgtgcgtccgcggaaggcttcggccattaagacgtgctgctgacctcatcctctcgctcactcttcagtcggccatcgttaagcccgcgcacgatgaattgctcgacgttgccctcgccggcacgacttataaagtcgctggatatgcttatgccggaggtgggcgtcgtgttggccgagtcgaggtctcgctggacagccagaactggatgctcgctaatatcacctagtgcgtcgtctttaccgacctaacagtcgtcgcgacatcggcagctgacgcgtgacgcagcccggaggacctttaccgcacgctcgcctactcggacccggtctacggcacgctcgacctgaccgaccgcgacgagtgcttctgctggtgcttctggtcgatcgaactgccggtcgaggcgctcaagaatgccaaggcgggcgccctcatggtccgcgctatggacgaggtgagcagctgcgccgacctgctggcagaaggacaggagctgacatattgttgccctcgtctccttcagagcctcgcactgcaacctcgcgactgtgcgtacagctcgcggccggccttcgaactgcaacctctcgagttgactcctcttccttcgccttgacacaggccccctgaacgcgacgtccatgatgaacaactggtggttccgggtcgccattcacctctcaccggccaacacgctcacttttgagcacccgacgctggccggtgtccagcccggcggctggatgcagcgcatgaaggacgagggcaaggacatcctcaaccccgtcttccgcgacgtagccggctcggccgctccgccgtcccaggctgtcaagaaggccgaagtcaagatgatcaacgacgccgttacgcgcaagattacgctcgaggagctcaaggctcacagctcgccgaccgagccctggtttgtcgttgcgggcgaaggttagcccctccttctcgccgatcctcgttctccctcatccgctgacggagcgtgtgcgatccctgctcagtctacgacggcaccggcttcctgaccgaccaccctggcggcggcgagtccatcacgctcatggccggcgaagacgcaaccgaggatttcatggcgatccactcgccgcagggcaaaaagatgctggtcgagtgcgtccccactcaacactttcgcagccggttggctctgactgacacgcttctcacctgacagctaccacatcggctcgctcatccagcctgcatcatccggcgccgcagttgacgacgggcccaagacgatcgacccagtcttcctgcaaaagacgcggtggaaggagacgacgctcgtctcgatcgagcccgtctcgcacgactcgcgcgtcttccgcttcgccctcgagacggacgaccagcctctcggcctcgtgcgtgcccatctcgccgatctctggctgcaggaagcgagctgacctgttctctgcagcctgtcggccatcacgtctttgtccgcagtcgagggggcgacggcgagcttgttcagcgggcctatacgcccgtctcgcggcagacggaccgtggttttatcgacctgctcatcaagctctacatgccgaccgtccagcacccgtctggcggccgcatgtcggcgtgcgtgcctcgtctacatcactccgactggtccctcatgctgacgacctctcttcctcctccggcagctgctttgccaatctcgtggtcggcgactcgatcgagctcaagggcccgctcggcagctttgagtggatcggccagggcgtcgccaactggcggggtgtccaccggcggttccgcaatgtcggcatggtctgcggcggctcgggcgtcactccaatcctccaggtcttgcgcggaatctttgacgacgacgccgatgtcgagacgcgtgtctggctgctcgacggcaaccggtctggggccgacatcctctgccgcgaagacctcgacagctacctcgggccacacgccgagcgctacaagcttcatcacacgctcagcctcccgccggacgactggccggcccactactcgcgcggccggatcgacctcgagatgatgcgggcccacctgccgccgccgggcgacgagtcggttgtcctcctttgcgggcccgactcgctgctcgacctgacggtcaagcctgagctcgccgcccttggctgggacctctcaagccaggtcgtctgcttctagcccccttttctctgcttctctcgttgtacgcctaggtcctttcgttgtagtcgcttgctccccctctccctctctcatggcctttgtcctcgtctggctgcgccgtacgttctcaaccctcggccggatccgaagctgcctgcgcgcgccttgagccgctccgacttcgactgccggctctgcgagcgacgccctttgtccgaggagagctcgggcagctcctagagacagcatccgctccgctgtcatctgtgcagctacggcatagcctatcggcagggcggcttcaatcgtcctcggcttgagtcggctgcgagctctagctattccaaatgccccccccctctgcttcgagctcaccctcatctccttgacactcatctctgcaacacccggcacccctagccctctcaacagctctacagcacgcatccgactccagcccatccagtagatcagcgacctcgagcgcgcacgcgcgacgtgacagcttcaacgcgttattcgactcctcgacctgcgctatcagcccgaccgtccctctgtccccatccctcttgccccccttgaactcctcagagctcaccaagatgacctcgaccctcactggcgtcgtcctgatgacgcgccacggcgaccgtcaaggcttctatcagaaccctctaacctactcggcgacgggtacgatgattacgccgctcggtaagcagcgagctcgaccggctctcgaggccgccgaccccttttgcgctcaaccggctgaccttgatccttctcccctgcaggctcgctccagcactatcaatcgggccaagcgctccagagacgatacgcgtcgaacgacagcgctccgaccgatatcgccgagctctcgtggccggccgtctcgctcgcggagacggtcgtcctcgccgacgcctccgagggccaagtcatcgtcgatagtgcgcaggccttctttcaaggtgaaccccagaccaattatttgcaggtgggatactcctgaccctggtgctctcctctcgcaggcttttacccgcccaacaaggacgcggccatgacgctcgccaacggcacgatcgtccaggcgcccttcggtggctgggtctacgtgcccgtagaaacagtcgaggccgacgagtcgttcattttcgaggcctacaccgaatgtccggctttcacgaggcgaacgaaggccgtctatcgaacgcccgatttcctcgccctggccgaagaggctaagccgttcctcgactcgctcgggccaatcgtcggcgggcgaaacacttcgcttgagtcgatgtacaacacgttcgactatgtgcggcgacccgcttggagggtcgggcctttcggcgctgaaagctgacgtgtcaatttttcggggctgcctacagatgaacgtcgcttacatacacaacgcctccttctactcgtcggtctcgatcgagacgatgcgctatgctcgcgcactcgccaacgaccacgagcaccgcgtcttctcggatcctgacataggcagccttggcaacattgccggagccgccttgctgccgacgatcattgtgcggcctgccccttgctctcttgagcaggccaacccaagagactgactgattgcaccctcatccctcctcgcaggacggcctcgagcgcatcgccaacgagacagacggcctcaagctgctctacctgggcgcgtcttacaagcccttcatgagcatattctcgatgctgagcgtcggaaacgtcagtgacgggctgccctcctgtggtttcgacttcaacctgaccccttctgctcttccgtaggacgacatcccagactacgcctctgtcgcggcctttgagctctggaaggacccggccggtgggctctcggtcgagctccgcttccgcaacggctcgacgacgacgaccgacggctccgacctcttgccgctcccgatctttggcgaggcctcgctcccactcggctcgctcaaaagcagcctcgcgccgtttctcgtgacggacctcggcgagtggtgcaacctctgcgagaatacggagagcaggggctgcgacttgattgagcgggtgaacgcgacgacggagggagcgtcggtgacgtcgacggtcggccggcatcggacgtcgccgctcgtctcgggcgtcattggcgcgctcgtcggcctcgtccttgccggcatagcctttgccgtgcttgaggtcgtccgaagcaggcgagatggggcccgacggtcgagtagtcacgcgcgacatggcccaacagacgccgacagcgtaggtcgcagactcggccgacccctcctgccagtgtacgcgttgacccttggtcctctgccctccctccagacgtacgagctccgaggcgcgccgtcgatcgactcgaagtcggatcggcaagcctgagccctctttcggtcgtctcgaccctcccgcgccctcttctctcacgatctcacgcctgcatgcctcagctcctttcctctcgcctcgcgagctgccctgccgccggtcaggggcatgtgtgatggccatgctcattttgtgaagatacaaacgctgcggcaggcaagcagggcagtgtgcaaacgtcagcaagcgtcggtagccccacgaccgcgctcagagcaacgacgtacacatcttcgtcttgcacgacatgtgtgaggccaaccttctggggcgtcgggttgaactttgacgagacgccgatgaccagggcgaagcggaagtggtcgacaatcgaccgatggacggcgtggcagacgtgctgtaacagtcgtcgacgagtggctcgtcagcttcctgctcggactcgatcttggacaagcggcgagggtgagggctcacctcgatcgtcgagcccttgcgcatgcagatcgggtcggtcaggtcgggctgctggccgcgcttcttcgtgtagaccttgacgagcgcgagctgcgaccagatctcggcgagcaggccgtcgaggctagacaatccagcggtcagccatccgtgttagcaccgcgggggttaggtggaggcagagggaggtacggacttgagcgagagctcgcacgagatgcagagcgagagcggctcgcggctcagccggtcgacctcctcgagagggatcgagtcaatcttgttgtacacctatagaaggggggggggcaaagggagcaatgtcagctcggggaggccaccctcgatggggcctcaggttgcctcacgctcaaagcgcctgctcgcccgagtagaaggggaggaccttggtcgcgccctcccagtcgatcgtgccctcagagagcttgcggacgagctcgacaacctcgtcgaccgagccaatcagctgctgggtcgagtcgcgctcgcgcagtgtgatcgtgttgttagcgacggctgcgtcaagggggtgtgaaaggatggcacaatcagcgactcgcgcacacgctgaagggcggggggggggtgagcaggctaaggcaaagggggacgcacaagcaaagtcgacggttgcgccgaacggcgtgccgagctcgtcgttccgggcgtaacgcttgccgatcgtcgcgcccgagtcatcgacgcggcaggcgataccgaccttgcgcatcttgcgcgctgagagggaggaaaggacagtgttggggtttcagtgacgagccgggtgcgctcaaagtgaggaggggacagacagagctcgtgagcgaccttcgagagcgaggggtcgttcgaaatggggacgatcaagcacttgaagggggcgaccatcgttgggagcgaaagaacctagagagattgggcggagataaaggaggtcagtcggtgatttcaatgatcaagggtgcggcgacgcagcgaagtggagaggaggccggggtagagaggatctgagatataggagcaaccacgctccaggaaaagcttgtcgacagagctgatttggacagggataacttgtgtttcgtcctttgaggagaggtgaggcaggttgggtgcttggaggagacttacgttgcgggccgagtcggcctcgcgcgaccagaaagcatgctcgaggatcgagtagaggatgcggccaatgccgaacgagggctcgatgacgttgggcgtaaactcgcgaatgttggtcttggtcgtcttctcctcaatcttgacccacccggccgggacctcgaccgactggccggcagcctcgacggtcgacttgctgcaagatgccggcacaggaagagcgcgccaagtcagatgtctgtgtaatttcgtaaggacgaccgcgacacgcacccgtcagctgcgagcgcgtcgcgcagcttgccgagcgcggcctggtcaaactcgtcgaccgccttggtaaaagcgccggcctccttcttgagcgccatgccgaccgtcttcttgtcccacgagcagacgagcttggtctcgatgatgggctcggccagcgtctgctggaccgacagccgctgattcgtcttcttggcgtggaccgtcaggtcgtaagctgaccggtcggcgcagccgacgcactcgatccagccgtacgacgacttgatttcggcgtcccagcagtcggcggcgtagtgggccatctcgttcgacatgtgctgccggaagcgcagccgagccgggtcgatgccgaccgacatcaggaacttgaagatgcgggcgatgaagtaaccgagcgtctcgttgtcaatgatgccctggttcagagacgcgaattgtggaagggtcagatgagggttatagctgtctggctatagctgcgccgcggagtacgcacctggccgacggcctcgccaatcgacatctcctggagctcggtccggccctcctcctggacgcccttgggcaggagcatgaccttgacgtcgcggacctcgtcgaaccggacatgcgtcttcttgtccgggtcgacgaagtgctcaatctcagccatcgtaaactcgcggacgcggaggaggccctggcggggcgcaatctcgttgcggaacgaccggccgatctgggccgacgcaaacggcacgcggccgttgttgaactctagcaggcgcgagaagttgacgaagtggccctgggccgtttcgggccggaggaagctgcgcacgcagaagccgaaagtcggtcgggatcagctccagcatacagcactccggcgatgacaacgagatgaggcgcaccccttgatgtggccggtcgggccaatcgaagactggaacatcaggttgaactcctcgggctccgacaggtcgttctgcgtctcggggttcttgatgccaaagcgccggatgaggtcgccgagctcggcgcccgtgtagttgtcaatctgcgtacgggcgcgcacaatgtcaagatcagtacctgggccggtcgggagacgcgcagattccgattcctccgcaaggatgacgtacctgggcgaggacaaactcgatctccttgacctgctcgtcctcgagcttgaccgcagtcgacgcgaccttcttcttcttcttcttggcgtccttgtcgtcggtgacgggagcgagggcgatgccgcgggcctccttgtcacccttcagactacgagcaggagagagagagagggagccagatgccgagtcaggaaccggcttggcgtgaagcgagaaagcgagccgcggctccggtcgagggcaggccagacaacgcaccgggcctcgagcacggcctcgacgaggtggtcggcgcggaagatctcgcccgtcttgacgtccttgaccatccagtcggcaaatttggcaacgtgaccggacgtctcgaggaccgaggcgagcgtcatgatggtcgtgtcgagctcgagcatgtcctcctcgacgataaagtgccggcgccaggcgttgagaacgttggcctggagggcggacccgggcggtccatagtcgtagaggccggcgacaccgccatagatgtcgaacgagggcgtgaaaaagaagcgcttgagcatgagctggtcaaagttcgacttgtcgaacgtcgacgctgccttggatccggcgtcggccatgaggggcagcgggcgcgaggcgtgaaggaggcggcgggctgtaagagaggggcgcgcgaggcgggcgagctgactgtgggcggaggaagaagagggctgtaacaacgagcgaggtcgcatgcacagtcgggaaagggagagaagagagagggagaggtgaagaaggcaagagagagagcgaggcgaggtcggagggtgagccgtgccgcgccgcgcgcgcgaactcgtcgagaaatccgaaattcgggcagctcgagtctcgctcggtagagccgcagctcagtccttctctctgctgcccatccaccagcccagcatggacgccgacctgtttgactttctcgcgccggcctccaaggtcggccacacgtcgtcggcctcggccctggcaaagaagcgcaagaaggacaagtcgtcttcgcgctcctcccggacccacacgcccgccgccgcctctgcctcagccgcgcccgaggcgtcgggctcgggctcgcgcagcctgagcccatcatccgaggatgccgcagcgacgaccaagagcaagaagccgcgcgtctcgcaggcgtcgaacgacgagcctgcagtggatccgatggcgagcgttgaggcgagcggaagcggcgcgccaatggccgtcgatggtgagctcgtcacgcctgcggttgagcagcagcagcagcaggactctgctcccctgccggttgtcgccgacgagttctcggaggagacggcccgggtggtcgagccgtccaaggccggcctgtcggcgcccgttccagagggcgagcaggccgagggcggaggcatcaagctgacgcaccaggtcagtgaccctccgcagccctcctccactggctcgaggtgcgtggcactgatgctgacagcccgcctttgcccgcccgtcctcgccaggtccgccaccgggtcgccatcccgccctcttatccctacacgcctatctcgcagcacaagtttaacgacccgcccgcgcggtcgtacccgttcgagctcgacccgttccagaaggtctcggtggcctcgattgagcggggcgagtctgtcctcgtctcggcccatacctcggccggaaagacggtcgtcgcagagtatgcgatcgcccagtgcttgagccggaaggagcgtgtcatctacacgtcgccaatcaaggtccgtccggccggccgggtcgagactgcgtgtaggtgcagccgctgacgctcttccccttaactccttctcaggccctcagtaaccagaagtatcgtgacatccttgccgactttggcgacgtcggtctgatgaccggcgacgtcaccattaacccgacagcgtcttgcctcgtcatgacgactgaggtgcgcgcgctcgctcgtccgctgccgagatccgatcgagattaggcgctgacagccccgtttccgctgcagattctgcgaagcatgctctaccgcggaagcgagatcatccgcgaggtctcttgggtcatctacgacgagatccattatatgcgcgacaagggtgcgtccgcacgctctaatgctggcccagcagcgccgaaactgacgacgctcacctcacacctccagagcgcggtgtcgtctgggaggagacgattatcctcctaccgcacacggtccactacgtcttcctgtcggcgacgatccccaactcgctcgagtttgccgagtgggtcgcaaaatcgcacgaccagccgtgccacgtcgtctacaccgacttccggccgacgccgctccagcactacctcttcccggccggcggagacggcatctttctcgtcgtcgacgagaagagtgtgttccggcaggacaattttgagaaggcgatgggcgggctgcagcagatgattggcgagaacccagccgacccgaacggcggcaagggccgcaagggcaagacaaagaagggcggcgcgctcaagggcggtcagtctggcgcgcacgcttggcttgtcaccgacgaaacatcttcgttgacatactctaatacccccactgcaggcgtcagcgacatctacaagattgtcaagatggtcatggtcaagaacctgaatccggtcatcgtcttcgccttttcgaagcgcgaatgcgaggggctcgcgcttcagatgtcgaagctcgagttcaatacggatgacgagcgcgatctcgtccagtcggtctttgagaatgcaatcaacgccctttcggaggacgaccgggatctgccgcagatccagagcctgctgccgctcctcaaacgcggcatcggaatccaccacggcggcctgctgccgattctcaaggaggtcatcgagattctcttccaggagggcctgatcaaggtgctctttgcgaccgagacgttctcgatcggcctcaacatgccggccaagacggtcgtcttcaacaacgtccgcaagtttgacggcaaagaattccggccgctctcgtcgggcgagtacatccagatgtcgggtcgggccggtcggcgtggtctcgacgaccggggtatcgtcgtcatgatggtcgacgagaagctcgagcccgaggacgccaaaaacatggtcaagggcgagtcggaccggctcgactcggctttccacctcggttacaatatggtcctcaacctgctccgggtcgagggcatcagccccgagtttatgctcgagcggtgcttctaccaattccaaaacacggcgagcgtgccgcggctcgaggagggtgcgcaagaccctagtgcttctcgcagctgcatcgctgtggctgaccatttcaatccctccttgtctgccagagctccgcacgctcgagctcgagcggtccgagatggtcatcccggaggaggcggccgtcggcgaatattacgaccggaagcagcagctcgaggagctcgcaaaggactttcggaccgtcatcacgcacccaacgtacgccctgccattccttcaacccggtcggctcgtcaccgtcaagcacgagtcgaccgactttggctggggtattgtcgtcaactttacgaaacgggcgacccccaagccaaaggacggcgcgccgccgctccctgccgcggccgagacgccccagtcgcactacatcgtcgacgtcctgctcaactgcgccgctggctcggtcgtctccaaggaccagcgccaaggggcgacgacggtcctgccgtgcccgccgggcgagaagggcgagccgctcgtcgttcccgtcctcctctcgacgctctcgagcctctcgcacatccgcatttttatgccaaaggatctccggccgctcgagggccgccagacggcgatgaaggcgcttggcgaggtcaagaagcgcttcccggacggcattgctctgctcgacccgatcgagaacatgggcattaaggatgacgagttcaagagcctggtcaaggtgcgcttgctgcttcgtgtgggtcgccccgtcgctctccccgctgactcctttctgccgcttccgccgcagaaaatcaaaacgctcgagaagcttgtcgaccgatcggcgatccggagcaatacaaagctcgacgagctctacgcgctgtacacagctaaggtcgacaagacggcttcgatccgggcgctcaagaagaagatttcggccgtccacaacgtgctccagctcgacgagctcaagtgccggaagcgcgtcctccgtcggctcggctttacgacggctgacgacgtcatcgagatgaagggccgggtcgcgtgcgaggtcagcacgggcgacgagctcctcctgaccgaaatgatcttccagggcgtcttcaacacgctcgagcccgagcacgtcgcggccctgctcagctgctttgtcttccaggagaaggtgcgtcttaaacgtcttgcgagcactgccgccccgcagagcgtctgaccccttcgttccgcccgcgcccgaaagtcgacgcaagtcgtcaagctcaaggaggagctcgccgcgccgctgcgcatcatgcaggaaaacgcccgccggatcgccaaggtctgccgcgagtgcaagctgccggtcgtcgaggaggagtacgtccagtcgttcaaggtcgaacttatggacgccgtcatgcagtggtgccgtggcgccaagttctcggaggtgtgcaaaatgaccgatgtgtgcgtaggccgtgcttctgcccgtcttcccggcccgcccgctgatgctgacctgaccttctcccttagcttcgagggctcgctcatccgtgccttccgccggctctctgagctcctccgccagatggcccaggcggccaaggccatcggcaacaccgagctcgaggagaagtttacgcgctcgctcgagatgcttgagcggcccaataccgtcatctttgccgcctcgtccgtccccatcatgactgatgctggaccaactcgtgctgaccggccgcaaacgctctgctcccatcagcctttacctttgagcgtccagctcctcacgcgcttcacgagcgaccatacgtcgcacgcagagatccatgcccttcccatcgtctcgtctccagcgagcaagctgcctgttgcgcggggccgttgcaagacaacgaagctcgcgtcgtcgcatggattgggagaagaccgctcgaatcggaccaccctcgctctattttcccgtgcccggcgccgcccaagcctgggcctgctgggtcgcccctttccgcgccccttctgccgctgctcagcgcacggcctcgcgagccgagcgccgacgcgcactgcagacatgtcgcttagacctgctcggcaccctcgtactcgctctcgactccaggctcgatcagcgtggcgtgcctgacagtccggcgtaaggtcagcaaccggccacgaaaggcagagggtgtagcggcggacgacgctggcgagacgtacatgccgatgagaaagatggacgagccgacgagccagaagaaggtcgacagcggggccgagaaccagaggagcgggatgccaatgatgaacaggctggattgggccaagcagcagagggtcagtctcctgcgcaggcagagtgctatcgcgaggcaggcgtggcggccggcccagctgaaaagggaacgcacgcggtgtagagcgacttctgggtgacgacgtgctcaccgacctgcatcggctcgggcgcgaacttgttgatggcggcaaagccgccgatgaggaggccgagcgcgatcagcaggagcgggttcgtaaggctatgaagggaggtgacaaccagggaggcagagcgaactgcggcgtcagtcgcggtaggcgctgagcgagagcatccagcagaggtggcgggcagggacgcacagggcgtagatggccaggacgccgacgatgacgaggtagttgcctgcaagacgagcgggacaaaggacagccgagatgaataagcgagcttgttcgctgaaggcgggcacggaggcgcgcagccctctcctccgatccgggctgaacgccgttttgagggcacacgtaccggagaagtagcgcgtgttgtacgacaggcgcgaggtcgcctcgttcatgtctgccggccggctcagccggtggtggtcgaagaatctgccgggtgcagaagccgagagagcgtcagctcgccggggagggctgcgggagagtggcgagagccgagccgacgcactcatttgccggccgcagcgaagacagcttggtctcctggtgagggcgaggagcgcaaagaggccagtcaacaagcgctcgctccctctgctcagagacttgcccggacgtgacgacaggcagcaagcggtcgactggatctcagtctaggcgcgctgccaggtcgcgaggcgcccgaggtcgaccccagcccggcccaacctccgctgctgctgccgatcctgtgagcgggactaacccggaacgacttgagatactgaggagcctgtgcgacgagatccatagcgacgagagcgaagacgggcgagggaccggactgcgagacgagagatgctggccagcagctggaggagggcagcgagaggcgcgcgaggcgagggacggttgcgcacggaaacggcaaatgcaagttggactgtcgcaccgcccctttccctgcgtctcgcagcatctcctccctcgcacctctcccctcaccctttgccttggtcctagagatactgcatatgctgctcctcctctcgcataatttttgggaggagatcatgttgacctattcgccgtttgccctagcctctctgccgctcgcgaacgcccaactcgaccgcgacgaggctcgaccggagggcctacgccgcagaccatcgcgatgcgccaccatccctgctcctctcgaacccgttctctaggcgtcagtcaggtacgaccggtgattagtacgtgcttacacttttccgtccggttggaagtgctctcggctcgaagaagttgcagctgccgatgttgagcgcgacgctcccgcaggaagccaaaaagcggtcggtgctttcgatctgactctatacggtacacgatggtgattcgccgtcgcccgtcgagcccttctggttgaatcgcctctgctcgacctcgtccactgtgacgattctccgttctctgtcgactgacccgggtccgcagcctcggcagccgtacctcttaagcattgcctgcgatcctctcgcttcctccccgccgaacccaaactcgttctccctcctccctccagcaacacctctccatctttctcaagatggctcctacagcagcggcgggcgacaagagcgttcagctgcctcgattctggtcgttcgaggatggccagctgcgtgagcaggcgacggacgctgacctcaacctttcgctcctcgccctctacagcccgagctcgagccgtacgtctaccaaggctcgcggttcaagcgcaaggttccgtcggccttctctgcttcgagtcggctggacgccgtgattaccgcaagacgacgctaagtctccctgttcgcccgcccgccctgctcgttgctcaaccttgacaggcatccgggctatcaacctcctcctcctggttgccctcatcacctcgtcgacgaacggctatgatgggagcatgatgaacggcgtccaggccctcgaaaactggaagaacaaggtacgtccttgcccgacacggggtgccgccgctctcactcggggcacgactgacaagtcctttctcctccttcttcgacctagtcaacaacccgagtgacggtaccaaacgcctcctcaatgcagcccaaagtttgggttcgattattggtacgtccatccttggcctccaccacacaactagtagggctgacgaacgcccggcgttgcccttcaaggctatcccgtgaacccctacgtcactgaccgcttcggtcgccgagccgacatcctcgtcggcagtgtcatcatgaatcggcgcagccctgcagagctcatgccacacggttggcgtcttcatcgcgtccagggcgatcatcggtgcgttttcagggcccctcatcgagacggatttgctgaacagaggctgacacgtcctcctcgtaggtttcggcctgaaatttgctacgaatgcggctcctatctttctgactgagctggcgtacccggtgcctttccttgcgtcgagtcgcactcaggctctcgcccgctaagccctcaccccttttctcgccctcagacgcagcgcggttccgtcacttcgctctacaactcgtgcgaccagccctctgcgtcgcctttcccttccgactgcgtactgatataagtgccgttctcgcctcgcaggctctggtactcgggctcgatcgtgcgctgcccttcagctctcggtgacgcgccgcccctgtgctgactcgcccttcatctagaccgccgcctggaccaccctttggcaccttccggatccctaactcgatgtcctggcgcatcccatccatcctgcaggccatcccttcgatccttcaggcgagtctcctctcgcctcttttgcgccccctctcctgtcgcaggctgatgttgcggtcttccatcatcctcaaatcgccttgatctggtctgtgccagaggtcagtctcgctctccttgtcgtccgatccagagttgcctggcgctgaccttttgttcctccctagagccctcgctggtccgtcgcacgtctgcaccggctgagctgtttctccggctgtccctcgactttcttcctttcaggctcgtctccaagggccggaacgagcaggctcgcgacgtcctcgcacgccaccacaccgagaccttcgaccgagaccacccgatcgtcaactttcagatggccgagattgaacaggcgatccagaacgacatgaccgaaaagacgtcctggctgtcgctacttgctgccccaggcaatcggaagcggctaagagttatcgtcgccattgccttcttgtcgcagtggtcgaatgttctgctcgtactctggtgtcaagttgcgccgtcgctggaaaggctcctcgtctcccgcagcggcaacggtcccgtctcgtacgcacccctcactcattcacttttctatcagctcgaccttcctcctcctcctgacctcttcgcctcgtctcaaaccgtcccccagctaatatctgaccgacattctgaacagcgtcggcatccggtctcaggaggttcaaccggcgttcaacggcggcttgcaaatctataattttcactcttgcggtggcagccgctatgtactgtgatcgtgtcagccgtcgcaagctcttcctgtggtctacagctggcatgctcgcctcgtacatgtacgttggcctgcgagcggcgctacttctggccaaacagctgaccacctcaccttcccaactggccagcgcttgagccacttgcggcatcctctacggcaacaacaacgaaacgacaacaaggctgccggtagcgcgatcctcggcatcatcttcatcttctacgggtccatctggcggagcccggagcctcatttgacaagacctgacgcctgcccccgccgccctcccccagcttctacgatatgtccgtctcccttcctcgcgcttctctgaccggcgtcagctgacctaaacatgaatcctgcagtgcctacacgcctctgatcgtctcgtacacggtcgagatcactccgacccggattcgggccaagatgtgcgttctctcgtgcagtcgaccaccctcacccgactgaccctcttcaatactctctccaggctctcggatttcaacttgtttgtatcggcctccctagtcgtgagtcccacagaccttgccagaatcagtgaaagacccatgctgacagtcggcaattgcccttcagttcaaccagtacgcccctggtctcagaactcgcccggtctcggacttaagctgacacccaccgaccgccctgcagatacgtcaatcccattgccctcgagacaatcaggcattgggactacctcgtgtgagtctcttgacattacgaatcgtctcctcggatccgcgctgacctgatacagcttcccccgaccgcagctacgtcggctggctggccttcgagctcgtcttcatctacttcttcctcgttgagaccaaggtgagcacgctcctccgtgctcgctccaatcacgaacacttcactgacagccgatctccactctagaatcgttcgctcgaagagacggccgccctctttgatggggacgctgccgtgcttgagattaacggtgcgaaggatgtcgacgaccgccggacgacgtcgcccagctcaaagtagaagctcccgctcgaggtcgagcacgtggaacgcgtcgaccgtgtgtaggcgtgcctggtctcacaaaacctctggccagacaacgcccctcccgatgacaccagcgggccgcagcctccctagtatatccctcttgtatctctcttttgcatcaaactataatcgcatgatccaggctgtatgtcctccctctctcggtcgaaccgccgcaccccatcgcatcgctgaagcacaaatggcctgagatggccggagcgcgtcgagtcgggcggctgcgcggacatctccgcgaccgccgccctttgtcgtcgaaacgcaccgagcgcatgtccttccctttgacgacgttcatccctttgacctcctcgggcacccctaggtcactcagagtcccgccgcagcgtgctagcttcggcttggatccagcctggctgacgagcggccgtccgagctgatgcgcctgtcaacctcgacctgctgagctcgccttgtcgacgtcctctccctccaagcagcctcttgatccacctccttcctaggcttgcatcaggtcgagcctgacatgctcccgccgacacccacttctatcgcctcgctggcctcaccctcatccagctccggcggtggaccaggccaccacccccctccactgcggccggctctccccgccactcgacctcgactcgctcccttcgcgcacgctccaggtcggctgatcagaggatccgccacagcagccgaggcgcaccaggataccgggccatccgagcaagacgactgggagcaggagatggaggcttgggagcgccggcgggatcggacgcggctcgcggctctcagggaggcgctctcggatgacgaggacggcgctggcttgctcttggaggctcagctcggaggcgagcagcagctcacagaggagcagcgacgtcagactcttgctgctcaactttcatgaaggacgcgctgacacgacctcctcttgcaggtctcttgtcgacctcggcctccttgcgcagccgagcgcgcttcgtctcgtcgccctcggatcggcacgtcctgctcaaggaggcgtccgacctcatttttgaaggtcaggtttgagcaactctccgcatcgcccagactgcatgctgactggccgacgtggcgcagcatacaacacccgcctgccgacggacgagccctcgacgacgctcgacctgactagccagcacctgacgttcgctctttctcgggtcctcgcggctctcgccagcctttcctcacgtcaagcccccggcagctgctcgccagagctcgtcgtcaggtcggacgacccgctcgagctcaggcatgcgctcgtccgtactgcgccgaaggggacgactgtccgcgctggcaacgccgaggacccggacgacccgggcttgcttgtgatcggcttggcgaccaatctggctgtgtcgacgcgaggcctggctggtccggcgtcaccgccgccaacaccggacaagccctgatgcgagcgagccctgtcggcattgctgtgcggccgttctcgaatgaggtcgacctgccgtcccctgtacgctctgctagcggcccgccggaaaaaaagcctcctccctcattagcgtgtgagaaaaagaaagtaagccatgtcaaagcaccgcaaagtcacccagcccgcgcccgcacggcgcacatacaaccgcctccttgccatcccctctcagccaagggatcgccagagcagtccgctcgctcctccgcctccttctaagcctcaaccttcttgaggttcttgtggaggccgagctcgaccttgacgacccggtcgagcagcttgtcgacgaccgcctgccggttgtcgccgaacgacgcttggagcttctcgagcgcctgtctggtcgaggcgtcgatcgtcgtttgcgacgacgacgtgtcggacgagtgctggaggtttggcaatgtagagattcgtgttggtcagcatcgagagtcgtggcggtatcagagactgcgcaggacgagcgaggcgatggaggctggcgtggggcatgaagcctggacgagcggtcgccggcgatcactctggtgagcacgcccagctggccgtcaacacaggctgccccgcgagcaatccatcccatcatgagcccgattaatgtcctatgtcgctccaaccgaaggagcccgaggccgccatcgcgccgttcgaccgcagcagcagcggggcccgacgaactggcagctcggcaggcgcgtgccagccaggtctctccctcaccatacgaggaagcgtcgtcaagcggccgccggccatttccagcagaagagggtgaaagcgcatttcgctccctcctcagaccgacggcagcctcggcaggcagctcgcatccctcgcttccgctggctgcctcctgccattaagccagcctgttgcccctccggaccccagctcacacagaccataaagcttgggaagctggcacgcacctcgctctcaaaggacttgaactcctgctccttgcgctgcttgtactgctcgatctccttggcagcctcggaccgggcgtccttgagcttctggacgcggtctgtttgaagttgaacggtgacgcagaaggaaagcaggggttggcgaagagcgaagggtggcggtatgagatgaggcagggcggaacgcgacgtcagtgcttgctcttgctcgttgacaggagcagaggctgcgagtgacggcccgggcgcggcaggagggggacggacaagcgcgagcggcttggacgatcttgccggcctccttctcggcctggacgacgaggtgagaccagcaaattcagtcaactgcgctattcgatagctgagggcgagattgagtcgccaagcaggaggactgacctcgaggagggtggcgatgccttgcgactgctgggcggcctgcgaggcggcgggagcaggatgaggggtcagtccaggtagggccgaagggcgcgagttgcagcgctgctgaccatggctgctcagatgctgaagggaagagaagaggatgaggcggcgaggatggagagggcggggggcaggtacgagcgagatgtcgtagaggggcgagcgcatgcatcagcggccagactgcgcttggacccgcacgggcccagattgcccggaagcgacccaagcagccccaggttgcacaaccgccttccggcgccgatgagccgcctccgcccgtcctccagcaacctcgcaaccctccacccttcttcctcctcaccctcagctcctgctcgccatgttctcccgttcgattctccgctcgctcgtacgtcgcctgtttgacttggctgctttgtgagggagggacgacaatccctggcctccgttctcgcatcgtcgcccgtcgctgatgacccaccgctcattcgtccgttcgcaccgtcctcgctccctgcttctcgtcgtcctctctccggatgctcgacccgtccatgtatttaatcgtcaacaggctccccgatcgctccgcacaccgccagcgcagagcacgctgctcgcccgctttggccagcgcgacctttcggagcaggcccggtcggcgatcgacgacgtgcgtgtcccttcctcgcagctcgaccttccgagcctcactctgccagcccatctggcagctgtggcctggcttgaggctggttggcgggagccgctactgtttttccgagaccaagggctaacccagcgtctcgcatctaatgcccatgtccgatcctcactctgctccgtcatcaaccgtgctctcgaccctcgtcgacctccactcgtcgtcctccacttgtcgtcccatgcccttcaacctccgcccgcgcctactcgttacggctcgtgcaggcgatcaaagcttcgccgctcgttgtcttcatgaagggcaacccggcccagccgcagtgcggcttctcgcgggccgtcattcagatcctcgacgtccacggcgtgccgatggacaagatgcacacgtacaactgtcttgacgaccaggagctgcgcgagggcatcaaggagtactcgtgagtccttccttcgcttccctctccttgctaagaggtgcacgccgggctgacgtcgttgcgcccatccgcacacagcgactggccgacgatcccgcaggtgtaccttaagggcgaattcctcggcgggtgcgacatcctgatgggcatgcactcgtcgggcgagcttgaggagctcctcgtcaaggagggcgtcatcccggccgagctgcccgagtccgagacgggccttagcgacggcagcggcgagccggcggccaagcagtagacggataaccccttgggtctgttgggccgcacgctttggctcgcccgccgactggccaaaggcgtatctcatctaggcgggcgaggcagcaaccactaaaagaggggcgccggaaggcgtggtttggcagagccgaacgactggccccgactgctcgtctgacgcccctttccagtcctcgttacgtacacggcggaccaccatcactctcctcacgcatattataatcgacgcgctttcgttatcgatgtgctcatgacagacgtcttcgtgctggcggtgccgccggtgccgcgcaatcgctccatcctgcgcagcctgtctcgcctgccggcctaagcgaccaacgcgtgtcgactcttgcttggccggctcgtcgcttcatcatgctgctgccgacgacgtacctctagtgacgacacgcgtcgacctgtcgtaacagggaatcagggtctaggccttcggctcccgttcgtgtttgcacatgcatcagggcggcgggaccgtcgcgaccgaccgaccttgactcgtcgttctgctaccgttccctcagccaagagcattgccttgcagctcgtgcaaagagtcctcccagccctcagtacgcctgcagcgccgagaagtgcgatgactgggcaggactgcccggtcgtgatcctagctttggcggacgcttccttcggctcccagctgtttgggccgcctcggtcatcgacctcggtcgacgacttgcgtcgcccgccggcctgctgccgtttgctcctgcccaaccttgctcccccgaggacctcatgactgagcgatgactgtagggggactcgcgtcgcctggctgcatgccggcttgcaagggttgcagaggggagtcactcttgcggctggagagccgagagcctaaattaaggggccgatggctgggcggggccggtcgtccctccgagccgcgacggctctccgccccctgtgcttgtcccgcactacaaaagggcgggtgcttctcgaccgagcgccggctcttgttccgctaccaacgcccacctgcccagaccgaccactcctctcaaccttccttccagcccagtctacccttgttcgacgcgacccccggccatgcccgaccagcccgagctcgctggcctcaaacaggttgcctcgacctcgtcggcctcgtccacaacagccaatgccctcgtcctcagcccatctgtcctcctcaccgacatgaccgtcaagcgtgatgacgacggcggaggaactttcgtcgaccgcctgcccagtgacggcgctcggctggacgacggcggcgagctcgagaagggcggcgtcgacaagctttcgccggcgaacgagacggacgacgagcacaccgcccggctcgcacgcgaggaacgcgagtctaagtacttacacggcttcaagttggtcaccgtcttgtacgtcccagggccgtcgcagcgggctggatcatcgtgcgctttggcgctgacgctcttgagcccctttcctccccttcatagcaccgcgatgcgtgagctccctccctctgccagcaccctttacctctctgacagcaactgactcttcttgattcttcccctcccggtcgccgccgaactctcttgatctctccgtgccaaatccacccgctggcgcctccgaacacccagtactcagcgtcttcttgatcgctttagaccagacgatcgttgcgaccgcgtaaagcttcattcttcggtcatcagtcacttttatcgctgatgggtcccctgctgtttccctctcgctgcctcagcctgcccgtcatcgtctccaccttcaacgctgtgcgtctctttcggctcgggctcttctaatcccttgtcacgcagtcatcgactgaccatctcctggcgcttcctccagctcgaccaggtccctttcgtcatctcggcctactttttgacgcaggctcctttggtgcgccactttgcgtcgggtccgcctgctctaccacgatgctcacttgccaggctcccgtcccactcgctcgacctgcttcagatcctcgtctacggccagcttctgactatcataagcaccaagtgggtcttcctggcggctgtggcgctgttcgagatcggctcgctcgtatgtccaaaagtggctgtggtcacgggcctctctgcgtcaacgctgactgctggtgttgacagatctgcggcgtcgccccgacagtcgaggtgctgatttttggccgagcggcagctggtctaggcgctgcaggttcgtcctcctcttgtattcgcgagtgggcggccgagtcatcttgctgaccttgggcaacccggtcaacagggatatttgtctcatgtctcagtcttatcgcgatcatagtgcctctccagaagcgcccgcttctgtttggcctgttcggtttggtctttggcgggagctcagttgctggcccactcctcggcggcgccctgaccgagcatgcgacctggcgctgggtgagtgaccggctcccgaggctcatcgtcgtcgccgtctcaagcgcctgacccctcgctccatgctttcaggtcttctatatcaacctcccaatcggcctagtgaccgttgtcgcgattctcttttggatcacggccgaccccgcacctggcatcgagaagctcgaggccaaggagatcgaagtctttggccggacaaagacgacgctccagcggtttatttcgcttgactggctcggcgctatggtcatcattggtatcactacttgcctgattctcgcgctccaggacggcggcatccggaagccttggtcggcgccttctgtcgtacgtcgctctcgtcctcaacttgaaattataatctttgctgacttccttgttgcgttccgcaggtggccgagcttgtcgtcttcgccgtcctcattgtcgtcctcgtcgcctgggagtggtaccgccgaaacaccaactcgatcctcccgctcttcctcttcaaggaccggtcgattatcggcgcgagtctcgagtccttctttttgatgggggccatgctgtcggccgtttactacctgccaatctactagtgcgtttcacgcctgttctggacctgagcatcagctgacatgcggcttcggcttctttctgcagccaagccgtcaagggccgcaccccaactgaaagtgggatcgatattatcccattcagttcgtcccctgccatgacgcttcgcaatcgacacgcacttatcgctgctcccgctttccgctgcagtgctcgcactcgtcatctcctcgctcatcgccggcgccgccatctccaagactggaagctactactggtggatggtcctcggccctcttctgttcgccccggctggcggagcgatgctctacgcgatgacaacagcctactcatcctccggcatcctcatcggcgcccagatcctgatcggtgtcggcattggcgtcgccatgcaggtgcgtcgtgcttgaaccacccccacccttccctcacctccctgagccacggccgctcgcctggcatgcttcgtcagcctcccgaacctcaccctgacacgattccgcctgaccttgctcagaacacgacgatcgcagtgcaggcagcgactcacgatcgctcagagactacagcacaagcggtggcccttgtggtctttgcccagctgctcggcggctcgatttgcattgccatcgccggctcggtcaactcgacgcaaatcaagtcgcagctcctcgcccgtggcgtgtcgtccgacatcatttcggccgtcctcatttcggtcgacaacattgctgccctgacgggcgacatccgtgtcacggtcctggtgcgtctcccgctaacgggttgcccttgattgagcctctgctgaccctcaatcgccccatccccctcaccgcctaacaggagggctatgtcaaggccctgtcctacgtatttatcatggccgtcccagccggcatcctagctggagcctcgggagccctgattcggcctctcaatctcaagaagattggcggcctcgaggcgctcgccggcggtgccgcctagaatcatcgtcttccccctcatcgacccgaactctgttgtgtcaccctttggcgctgtcagccgctcaagccccccttcctgttacccttgtctttctctaatgtcagccttcgtattcgccgtcttcagcgcaaactcggatgtggcattacacgccgcggcggacatgtgatctgtcgtacaagggcaggagggacagtgaaaggagtcacgcatggggcgcgctcctcgagtagaagaaggagaaatgtgttgaggttgaattgtaagcttttttaggtcgtgaggttggggtttaggaggctagggcatgagggttgaaacgggaccgcggtgaagaagcagagaaagagtgatggtgagaagaggagcggccgcaggcgtcaagcgcgcctgcggtgcccgctgtggagggggaactgttgcgaggaggaatcggagcggtcggaaggacaaaggcatcctcacggcttcctgtgagtgggagcgcgcacgagccagcagatgcgtcagcgctatctctcggacgctcataaagagacggcagactgaccggaactcggccaagaccgtgtagatctgattaaaggccgtgtaaatctcctcgcggacttttgcgcccgtcaggacaatcttgcccgagacgaagatcaggaggacgaccttgggcttgatcatgcggtagatgaggcccgggaacagctgggccacgcggacgagaagggtcagcctgccggccactgaccagtatcgaggaaccggactgacctctggctcgtaggacgagaaggagccgtgcgagtaggcgaggccctcgagccggatcgggaacttgacgtcgcatgagccgacaatgttttgaatcttgaactcagagaacttggcatcgaagccgagcttctggatgatgcgcgcgtacctagggcggtcgaaggtggaggaggtcagtataaacccgcacccagagttgcgtataggcggggaggacgcacttgcgcgacgccagacgcgagtcgtcctccgacttggcaccggtgacgaccatcttgccgctcgcgaagatgagcgccgtcgtcttcgggtctcggatccgcatgatgacggccgcgaaacgctaaacgaaggccggggcagggtcgggtgagcaagctgtacggctgagaggtcgctagctcgcgcagctgcgagccccccgaccaaagagcaagcaggccgcaccttcgggttgtactcggcgttacgtgcatgcagggcaatcgtcttgaggtcgagccggcagtcgaggttgacagtcgcgacgatgttcctgggggcgcgaggggttgggcgactccattcagtagctggctgcaggcggatgaagcatggacactgccgccgccaccgcttctcgttggctgagagcacgtagcacgcgcccgacatacgcgacgcgctagtaatcatgccctgccgtcgactagctgctgctcgagcccatcgtggcacgcctctggcggccgacgccgccgccgccgccagcgcttgcccgagctccgccgcgccttcagtggcggccccacctctggcctccctccagcattcgacccggcctgagcggaagccaagactcactggagcgtcggaacgataccctggacggccgtgatcctgatcgaccacgaagagcggatgggaaggattcgcggaggaaggtggcgaaggacagacgctcagtggtcagcctccttgcaagtctgcgacaggaggagcctgcccagcggcaacgaccgccggcagcagcgaaagagtggcctcactcgggcacgctcagcagctgaccgctcccgcctggcgtcggtgccggcgtcggagcgcccatcggtgccggcgtgggcgccgagagaggcaggttgagcgccgggttaaaggccggcgtcgacaccgccggcgccgacgaggtcgaagcggtagcgttctcctgaggccggccggcggaaggcagcgagagcgacattaacggtcgtaggtgctggctgacgagaggccagggcggatgcgagggctggacgagggctctgggagggtaggtcaggagagagggggcgatggcgtcgagggtcaaggagcggcgccggcgagcggaggtcatccagcggccagcccgccgcggaagcctctcgacgagttgcctgtcgttcgctctttccattcgctcgtccgaggagagtcacagaaggctaggtgagggtcatgcaagatcatcgctcccccgccgtcgccctacttgcagcggtcgacgacctgctcggcgagcccctcgagtccctcgcgcgcctcgctcggcggcaggcgctcgcggatgacgcgctttgcctcctctgcgtacttccgggcgagcgcccgggtccggtccatgccgtcgctcttgaggacgagatcgcggacgagggcgacgtcgcccggctcggcgaaacgtcgcgcgatgagcggcgtcagagacgggttgctctcccacgcaaagagcagcggcgccgtcgcgaggccgagcgagaggtcgaagccggccgacggcttgccgagcgacgtcgaaggcgtcggagtaaaatcgagcaggtcgtcgacgagctgcgacagaagacaggtcagcaagggctcgctgtgacgccgcctcgggtgacgcacctggaaggcaaggccgaggttccggccgtaggcataggcgacgtccttgaggccctcgtcccggccggcaccgccgagcaggacggcactccgcgcactcttagccatcaggctcgccgtcttgaggtacgtcttttgcaggtagcggtcaaagccctccttggtcggccgcgtctccgggttcgaggtcgccttgagttgcataatctctccctcgacgaggttggcaatgacggtcgacatgagctcgacgagctcctggctgccgagccgcgtcaggccggccgaggcccggccgaggaggaagtcgcccgtcaggatcgacaccttgttgccgaactgggatggcgcagagggctcgccccggcgcgtcggagactcgtcaatgacgtcgtcgtggaggagcgtcgcgacatggatcatctcggtgatctcggcgagccgcttctgggtcggcagaagctcgttggcgagtgtccgctctgccatcggcacggccgagtacggcgacgggtcgggcaggcgcgtgatcggcagcggcggtgacggccgcgagggcgagcccgaggggacaaagacgtcggcaaacgaggtcgctgactcgggcatgcccgggttgtagtcgttcaggacgtcgctccgggctgagacgaactcgtccatgagcgcctggtcgcggccgcggagctcggcccagtcggagccgaggccgttggtcgcctgagacatcaggaggacaatcgtcggccggacgtgcttgccctcggcctggaagtaatacttcgcgactgtgtcgaggacagggtggcccgagccaagcaggtgcgagacgtttgaccggagtgacgaaagctcgtccttgatgaggccaagcggcgaagccgtctgcgggacgcccgccggcagatcgggcttgccttgcggcgtgaactggagccgggccgcatcgaggagcgagatggacctccgctgaggcctgatccggcttgagaggacgaccgacgaccgacggaggggcgaagtggaggaggagacggcgacgcgcaccggcgacaacgacgacgacgaggcgacggtcgaagggccgcccatgcagcgcaggagcgaggaggacgccatctaacgacgagaggagttaccggaaagcgtctaggtccgtctaaatatgattgaatctgtaagttgagaaggacgagcgatcctggtcagctcgtcgttcctcctgctggcgcggcttgcgagctccgtcgttcgccgccgccgtcgagacggacgttcgcctcaccgcaacgatcgccgcccgagggaagcctcgaggacggccagcctgcgcgaacgagtcaagaggaagcgcgcacgcacctgtctatggcgccgggaacgaggttgcaagctggcaggagggagaaggcgcgggcgtcgagggtcctgcaggtcgtcgtcccggatcgaggcgttctccgccccacgccgcgcactcggtcacgctcccggtttacgcgaagcagtaactcgcgaagtggacgaggtcgagggtcgacagctcgtccttcgacctgctccctccgcaacccccatgacgcttgcaacggaagccatggacaccccgacagcctcgtcgtcgacggccaagctccagggctacgacctgtaccgcgcgcttggctcgccccggcacgttgtcgcgcccatggtcgacgcttctgagctcgcctggcgcgtcttctcccgctcgcccgttgacccggcaaccctcggcgacggcgagcagctcgccgaggaggccgtcggtgccgacgacctgaagggcaagggacgggcggctcttccagccgctcatctcgcctacacaccgatgatccacgcccggctctttagcgtaagtccggccgtcctctggccagacgcctcctggcagctcagtcgacgccgaccctgtcgctctgatcgccctggctctccccacaggagatggagcaggacaacgtcaaggctcgtgggctgttcaacctcgtatgcggtgagttccgacggctgggctgtactgctgctcgccaaactggagctgcgccgtggctcgcgctgaccctcttgccgacgacccctttccacgatcaggcgaggaaggcagtcataacgcgcttggcgagtttggcgtctcggaccggccgctgattgcccaggtgggccttctgtggaccgagctgggcgaagccaagtcgtgagctaactcttccgcccacttacctcaacggccgaacattcgactcagttctgcgccaacgacccggatgaactgctggcggccgcgcgcaagatcgagcacatggtcgacgctgtcgacctcaacctcggctgcccgcagggtatcgccaagaagggccgctacggctcgttcttaatggaggagtgggacctaatccacgccctgatccgcaagctccacgacaacctgtcggtccctgttaccgccaagtttcgcgtttacgagacggtcgagaagacggtcgaatatgcgcgcatgctcgaggacgctggtgcccagatcctctgctgccacggccgcctgcgcgagatgaagggccagtttaccgtgcgtcttgccttggctgcaggtccgggccaccgccttgcgccgcggagctgaccgtccctcatcctaaccttcgttcgctcacgcacagggcctcgccgactggagcaagatcaaggcggtcaaggaggcggtcaaggtgcccgtctttgccaatggcaacatcctctacaccgaggacatcgagcgctgcattgctgagactggcgtcgacggcgtcatgtcggccgagggcaacctgttcaacccggccctcttcctcccggcccacctccagcaccagcccgtaacggcgcttgcgctccgctacctccgcatcgtcctcgcccttcagacgcgcaccgcgtcgagcgccgtcaagagccacctgttcaagctgcttgcgccggcgatcgaacggcccgagaaccgctacatgcgcgacctgatgtgggcgggcgtcaaggtcggccgcgagggcgacgcctgggggatcaaagacaagcagtgggtcaaggactggatcgcgatgctcgagacgttcgagcagaagctccaggtccaggcctgggaggcgctttcgccgaccgacgaagggcacgacgtccccgaggccgagcgggcaggcctcttcccgccgattccaaagtcgtttgcagaggacgcggcgaccggcctccggacgatccccttctggctgtcgcagccgcacacgcggcccttgccctccggagcggcgtctgccccgttcgcagcgacgtcgacggacgaggccgctgccgcgctcgggacgtcgtcggccgcggccctatcgaagccgtttaacgcgcagtgcacggccgccggttcgggcaccaagtgcaacaacatggcgagcgcaacctgcccgcacggggcgtgcctgatgcactgccgaatcgagggcgctcgcaaggccggcatgtaccccgtcaccgcattgccatcgggagccgtgacgccgacgacggcaacctccgggcccatagctgcgcctgagacctcggctgaagcctcaaaatcctccggggctcccgcggtgccgacggcctctgccaccaagcctggctacggcggccaagaagagtacatcggcttcggctgcgagatgcacgaggccaaggtgcgcgcgcgtgaggccgcccggctcgagaagaacaaggcgcggtccgaggcccgggccaagcacgaggagacaatgcggggcaagggcagcaggcgcgaccatggcaggggcacgaagggcaagcgcaagaaggcggaggtcgagagcgaggaggaggggctagcgcagaagcgcgtcgagcgcgagccgcacgctgccgctgcaggaccagcgccggttgacgagcagcctgcagcacaggccgagagttcgataccatgaacggcttccatctgcttctcttgagtcggcgatagattgagtgcctcgtcctgccgacgtaggcccgagtcgatcgtcggcgccgcgagagcgaatcgaagctcgcccttgagctcgccagcgcttgccgacacccaccgcctgaccgtcttgacacgccaccatcgcacgcaagccagcagccagacctctaaccaactcagcttcccgtcatctccagtgacgatggtcgcgtcctcgtcgcgcccgatgagcagcctgctcggctcgggctcgctcctcgccgccctatccaccgcggccgtcctcgcggccacgcacgacactgcccaggccgacgtcgtccagatcggcgaccttcccgtcggatcggccaagccagacgaccgtctgtcgaaaggaaagagtcgggccgtcccggtcgagctgccgagcgggcccgacggactcgcgaccttcggctggggcacgccgttgtacgtccctcctcgaagcgagctgccctctgccgcagcttgccgttcctctgccgtgccaggcacggctaaggtctgcagccgactgacacgcttgcttgtctgcagcgccagctctgccgcgcctgtccgctatccgtcgctcgtcacccacctatcggggccgggcatggcattccgtgacctcaagatggagcgcaattacggcgccgtcgtcgacgctcggggcgacgtctacctctggggccgaggcattaccgacggcaacgaggccaagggcggtctcaagcactgtctccagggtctcgtgcgttctcatgcgtttctgctcgaggctggcgagcgatgtccggctcacgttcatccctttccctgcccggcggctgcgcggcctctcctcttccatccctcccagaaaatcaccgcgctcgccccgacgccgaataagctctatgcgctttcggccagcgggacgatctatgcgctcccgacgacgacggcgctccagcagacgaccgagtccgagtcgacggccctccgcgtgctcgaccccttgcgcctgttccacagccgaccccagccggtcgactgtgtcgcgctgacgccgaccggctcggcactcaatagcacgaccttcacctcgtttgtcgcgggtcagagccacctactcgcgctcagcaagacgggcgtcgtctggggtcacgccgtcgacgagaaggcaaactggtttggccagctcgccgacctcttggacgtcggcggcgaggcgggcgcgcttgaggcccaggacagcatcgactggacggcccggcaccgcgaggctggcctgcagatcacaaagacggtcgaccccttcatccggaactacctgccgacgccgaccaagacggttgatgctgcgcaagggctgagcccgctgccccggacgaccgcgcgcggcctcaagcctgccgaggacatccactggtcgacgacgattcacccgatccctgcgctcgaagacctccagatcccggtgacgcagctggcggcgacgaccaatgcctcgtacctcctgctcgccaaccagcgcgtcctctcgttcggccacaacgcctttggccagctcggcctcggcgcgctcaagacgtcggcgaacatccggctgccgactgaggtcattctcccgaccggaaagacgtgcacgcgcatcaccggcggcggcgacgtcgtctactttgagacgcggtcagacgtcggcggcgccgaggtttacgcgagcggcatgggccagtggggcgggctcggcaacggcagctggtcccagggccaggcctcgctcgtccgcgtcaagaacatctcgggtctgagcgaatgtacgtagcctcgctccttctcgctcctcatgagccttccctcagctgacctgttctccttccgactgaggaagtctcggagaaggccggccggctcgagtcgatcccggtcgaccgcctgtctgcctcgccgagctggttcacaattgcgacgctcgcgacctctggcgggcgtgacgtcctcgtctggggcagcaacgccaactcgcagctcgccaacctcaagaagtcaaacacggcccagccggccaacatgggcaacctccccggctcggacccagccgtcggcgcgcgcatggtccttcatgagcggccggccgtcgaggtgcgcgatctcgagggcaacaaggtcggcaagcggccggttcggcaggcggtcgaggctggctggggcggtgcggccgtctactggcgggtcgactgagggtgcgcaaacggggggcttgcaggggtcgttgagtgctcagtcgtggcctattccatctccatcctgttgtcccgtcgcacgcccctccaccatggcttgcggcctctgtacgactcagccctcgcatctgtgccggccaaggccgaagtggtgctagacgagaggcaaagaggttaccgggcggcgggcggctgcgcgcgggccggggcactctcgtccctccgacggcccggtcgacgtgccggccgacgacgaccagccacctcgtcgttgctcacaggagctagctccctcgggtcaggtgggccaagattccgctgcacgaggcgggcgagatgccttaaaggcagaggggaagggcgggaaagctgatctctcgactgaccctccgaactgctcgagccatcgtcgtccttcccctcctccagccgcacgagatgctcgtctcatcttcctcctccttcctcctagcggttctcgctgccttcctcgctccagctacaggcgctgccagtcctctcgcctccaacaacaaccacggctccggccagacgccgacctcgccgctcggcccggtcgtccggctgccgcagggcgcctacgccggcaacgcgacgctccccggcgttgtgttctttggcggcgtcccttatgccgagcctccgcttggcgagctccgctggcggccgccggcgaagttcaagcacctcaagggcaagggcaacaaaggcgaggtcgtcgacgcccgaaactgggggccgatctgcatccagcagccggcagtcaacggtatcggccaagaaggtccgtcgagagctcgccaaacagcatcgctagtctctgctgatctccctcgtggaatggtcttgtagactgcctgacgctcaacgtctggaagccggctggcgcgagcgaggggtccaagctgccggtcgtcgtctacatccacggtgcgcccccttccctttctcccctcccctccttgggacattgactgatcattcttactacctttctcaaaggcggaggcaattattacgggtccagtatgggcttccctctgaacgagtgggtgacgtcgtcgaacggggccatcgtcgccgtcagtattaattaccggctcggcctgctcggcttcctcgcctcggccaacggcgccgtcaacgggacgctgacgccaaagtatgttctccctgccccgaggtctggcgccgaagctgacacgcgcgacttgccttgtcgttatcaagcgtcggcctgctcgaccagcgcttcgcgctcgagtggatccaagacaacatcgcatcattcggcggcgaccccaaccgggtgaccatctcggttcgtcgaccccttccgcaccctcttcctgagcgtttcgtactgacgtctcgttgccggttggctttcattgctcagggcgagagctcgggcggcgggtctgttatcaaccatttgctcgcctacggcggcgagtcgaagccacccttccacgctgccgttcgtccctccccggcgacttcctcccgtgtgtccggcccctgcctaacgcgctcaaaaatatcaccccctcctctccgccagatcggccaaagcccagccaacgaccccttcccgttcccggccggctacgaggcgtgctttgtcaatgctacgcagtcgatcggctgtgagggggccgacgacgtcgcttcgtgcctgcgctcggcgtcggtcggcgccatcgtcagcgccgttagtgagtcctccttcctttgacctgcacgagcgagcccgtgccgaggagctacagcaagctgacgatggctctttctcacctcgactgcgacagacaaccgcggctcgtgcaagttcctccctatcatcgacggcgacctcatccgttcgctcccctcgacggccctcaagtccggcgcgtttgccaaagtccccttcctcggcggccacacgaccgacgacggctcgatttttgtcggcgacccgtcgaaaatcacctcggacgagcacgtcaagaaggccatcacgggccggtacaagtcgctttcggaggcgacgctcgagcggatgatggcgctctatccgttggaggcgtttgagagtcagggacagagggcgagccgggcgtttggcgacaccgagttttcgtgcacgccgtttgtcgtcgggcggaagatggccgaggcgggtttgccggcgtacaactacgagttgcgtccctgctttccctctcgcttgctcgcccgccgactgaccccctctccttctattccgcccgcaaagatgggccgcccccgaccccgtccagctcaaagcccgcggcccgtgggtcggcgccctccacacctcggacctctggtacctcttccaagggaccaactctggcccgtcgtccaacaacgcgctcggcagctttgcgccgttcaatgcgactgagcgggcgttggccgacgaggctgtcggcgcttggacggcgtttgtcgctgggcaggagctgagggctaactcgccgtggccggaggggccagagaagaagtacgtcttccgccaggcgcccggggcggaaggaggggaaggaacgacggggagcaaatctgaggacgtaggcgcggcgcattgggcgcggtgcgaattttggctcgaggtcggtgaggagcgccggctctagggccgggcagggatgggctgagctcaggagggagcgtgtgacgatgcttcatcttgatgacttgtgctatgcgacccgagagcggagaggaaggcggctggctggccaggcgtgggaacgcttcaaccgggccgggtcgagcgacgaatcggagtcgatcgatcccgcccgcatccaccctcatccctcccctccatcctccagccatggccgcccttcctgctttcgcactcgccgcacgctcgctcgccctcgccggccgtcgggcgcccgcccagccgctgctgctcgccgccaagcgcgcgattgcgggcagcccatcgcgcaagagcgacgccctctttgtcgtccgtcttgctggctgccgtcccttggctcgctcgctcgagtgagtatgggctgacctcgcttgggatacgctcgatcatgcagcaccgcgacaccgactttaacaacgcctcggtgcgtctagcgagcaaacgatgaggccagtgtgataagaggcgggctgaccacctttgccctctccgcccgtctagatccccttcgagttcaccccttccaacctgaagaaggccgaggagatcatcagccgctacccaccccagtaccgcaaggcggccgtcatcccactcctcgacctcggccagcgccagaacgacaactggacgagcttgagcgtcatgaactgtgcgtccttgattggcttccgcgcgcgcgagcgccgggcgcaggagcgagcgaggcctggctcaacctcctcgccggcctctgggtcggtcgagcgtctggacggtggcacgctgaaccgggctgggagcttagaagactgcaatagtgccaggctgctgacctgaaccccttctaatctgcgtcgccctgcctgccagacgtcgccaagctgctcgagatgccgccgatgcgggtctacgaggtcggtccctccttctcttccgcctccttgggccgcttccgcccagctggactgctccgcccgccggcgggcggagcagtccagctgggcggaagcggcccaaggaggcggaagagaaggagggaccgccgccaggcctcttcccccctcctcccccgcctgccgcgttcagcagctcagcagccacatcctcaggtcgctcgacaacggcgctggccaacaagtcgctcatcgatcgctttgatctgcatgcccggctcccgtctgcaaagggcaaggagcgggcgctcgacgacgacgtcgacgcgcaggccgcgactatcggcgaggaaggcagcaagccgaagggaaatgcggcaaagtgggagtcgagcgccgaggcgcgcgaggcgagcctcaagcggcggaaggaggagatggttcttgaggcgaggcggtgcgtgcagcctccacaccgccctccttcctgactctggcagagctcacgtctctttcccgttcggctgtgactgacacctcgtctctgctcgctctcgccctcctcctgtgttcggctctacaggaagctgctcgccaagcgagctcggcaggaagccgagcgcggagccacctcgactgaggctgtttgaggtacagctcccttcacttacccaaccactctcactcgtcagtcgggcttggcgaatgtctgtgcatgacgactccctttccttcctcaccctctcaaagaggtctgtcgagcgaccgagtgaagtgcggaacgagtgggaggacttgaccgcacgcgaggcgtctgttcgcttcagacgtgatggcctcagtcagggaatctctctcgagtttttactcagcccgtcgtccaacgagaccggccgagcgcggctgaaaacgaacgacggtccagcgtcgatcgaccgtctttgcggggcaaatcatgcattgaaaggaaggaaaggaagaggaataaagggcgggtcggtcgagcggcctagaggcaggctctcaccccgaaaggcgtgcggcaagaagagtacaggtgtcggaaaggtcgacgaggaggtggctagcagacgatgcgaagtgtcgcaaccgaacgcctagagcttggcggccatgtcaaacttcatctgctggatcgcctttccggggttgagacccttggggcacgtccgcgagcactggagcgaggcgggaaggttcagagtcagcacaggctgacgaggtgaaggttgcgccaagaaggacgcacgttgaagatggtgtggcagcggtagagcgagaggttattctgcatcttgtcggaccgggcctgagtgtacgagtcctgagaggacgggaaggtggggacgcaaggtcagcagtgggttcgagagcgttgaaagcgcgggctggcgggacgaacgcgcgagtcggccatccagcggtaggcctgcatgaggacggcagggccgaggtactcgtcctggttccaccagtacgacgggcacgacgtcgagcagcacgcgcagagaatgcactcgctgtgattgggatgacagagaacacagtcagcgtctgcaggctggagcggcaggcagcgacgagagcgcaaacgcactacatgccgtcaagcttggcccggtcggccggcgactggaggtattcgccctcggccggcgggttgtcgttcttgaggaagggctcgatgctcttgtactgcttgtaaaagttggtgagatccgggacgaggtccttgacgacgtacactgcggagcatgtcagaagccggtcagatcgggctcgatcgggcacgatcggcatgcgccagaagaggctcgcgcctttaaatggcaggcgggacgcactgtgcgggagcgggtagactttggacggcttggccgtgttgcggtcgatccggcacaggcaggcgagcgtgttgacgccgtcgatgttcatggcacacgagccgcagatgccctcgcggcacgaccggcggaacgttagcgtcgggtcaacctcgttcttgatcttgatcagggcatcgagcactgcatgagcgggccgcaagagaaacagagcatcggtgcgatagaaagggacgaaggaggagggaaacacccggcggtcatcagcggtctggccgggcagaaaagcagctggacaggcccagcaggcaggcgccaaaacgcactcatcgggcccgtctcggagagatcgaggtcatacgtctgcatcttgggcttctccgacggctggtccgggttctatgaggcgagcagacgtgcgggatgagcagaggatcagttcgatgcccatcctgccgttgaggaggctcgcattggctcgtctcgcgagggcggcggcggcggagaggcgctcgatcagccttcccctcgcaccgccctcccacctcgacctcgcgccgatcgagcagggtaggtgcgagccgagccgtgcgatcgacgagcctactcgaaagcaagagaagcgcggacgtacccagcggtagatcgagaacttcttgatgaccttctccttggtggccggcgcctcggaggcgtttgagctcgtcgcctgggcctgcggcaggacggccgtggtcgagagggcggcgcgcgagacgaggttcggcgacgcacggagcgcgcgggcagcgttggtgcgaagagcgaacattatggaagggtgaaggggaggaggagggggggggggaaggaaggtggtggttgtcgggcagcgtcggtcgagcgctctcgtcgctcgcggctggacgagcggccgacgggcgccagcgcggccagggaaccaataacagcccgccggaaaccggcacagcacctcctcgtacataccttctttgtcctgagctggatgcatacccgcagcgaggccatcacatattttgtgctacaggtctgcgatttcttcgaaattgtattcaggtcaccagaaggggaagggaagaaactgctcttcatcacgctgcgctcgatcgttccgacagccctgcacctctctttcctgcgagttgtcccacactcgccccatactctctctcgcaagcggacgtgaagctgctcgcgatgctactaaagaggaggcatggtccgtcgccgtgctcgagccctgccagaaagatcttgagcgctgaaaggggtccgcccgccgaaagccgaacccgcctctggcgcgtgactgcgaccatctcgtcctcgcacttggttgggacggttgcaggcagatgctgaagggatcattcatccatctcgtcgtcctcctcatcctcctcatcctccgccaggtcaaagacgacgagctccttgccgccccacgccaggacgctgcccgtcatccggcccttgcggccgttgagcgccagactggccagagggaggggaagcttgccgtcagacgaaaggagtgtcgactcagggttactccgcggcaagcggtcgagcgacgcgaggtggcggacacgggcgagcgggaggagagggagctggcagggataagagagacgcagcgtcagcgctgagacagccttgatagacgacaagtgccgtagcccgtaccgattgaggacggctcgttctgatggcatgctcgagcgcgcgtggcgcgtcaggtgagggcccctcttgccagtcgacagccgaaaggtcaacgctggcaagcagcatccgggcgtctgagggaagagaagggatgatcgggtacgtcagacgagatatccagagagatgatatcaagagccagcgtaccctcgtcgaccccggtgctcatgaggaggacgagctcgtcctctgtaaagaagtcgagggcgacaatctcgaccgcgtccatgtcgtcgaggtcgggatgttcgatacgcagagcgaaggcggcgatgacgagtcggtccgacgacgccgagcgcttcacgagccagactgcggaaggggatcgtcggcacgacagtcagctgctgtacatgatgccagaccagcgagaagctcgcacggatcgagcttgaagggtcgtcgccgacgacaattgcgagttgaagcggctcgtcatcgacacgcctgacccgcaagagcctgccgagcgcgcggaggtcagaggaggactgagggtcatcctcgaccgagtcgacgggcggaagcgcgtttgttacaatttttcggacggcaccgacgaggccctcggcaatcgcagggaggttgggtagttctgatggtctgaccacggccgtcgtctgggccgtttcgtacgttgatgcgttgccgttaggtgccgtctcgataaagacggccgtactcgtctcggatggcgaggaaggtgcgacgccgccgccagcggaattggtcgtctggtccatctccatcgacatcgagaggtcgacgctgctctcgtccatcgcgtcgaagtcgtcgtacggcccttttcgctcggccaccggtggaggagcggactttgccggcgaaggaagtcttattggacgcgagcggttcaggacgggcgacttaagtaaagggtgggccgatgctgcaaacgaggcgtcgtgaccagggttgtgccctgatgtggaggcgggatgggcgacgactttggcgagccgggcgaggagcaagtcgagctctattgagctggccgaattcgagggcggaggcgccgagacagttgaagagggcaactcggcagcaaaaaagcggtcgacgtccaacttgagcaggctggcctggataaagtcggcgacgaggaggacgttgtgcttgccctccagcaaggggtcgtcctcggccgaatcttgtgaggcattggccgcggcagttgcgacctctgcgagacgaggtgctgggtcagctgggacgtctgccggcgcaggtcggaacgcatgtcgacgcaccgtaggcgagccaaaggcagaagtgcgaaaagcgatggtgctcgtctctcgcctgctgctcaagtacgatgagctcatgcgcgagcagcgtcgtcacgcgtatggcctgctcgatctcggagacgtcgaggcagaggtgcgatctgtagcgttccggcctgcattgaatgccagctcatgtcagcaccaacgttcagagggagggagaccgtcagatcgcaagacgcaggacataccagagagcccatccgtgcagctctttgaggagaatgagcacccgctccgcggccgggatcaggtcggccgatgtcgtctgtcgcaccgtcgtgagcgctccaagaacggtcgactcccatcggccgagcatctggtcagccggtgagtaaagaggtcagctggcgtgcgaaagtttgggcagcgttcgatggttgacgcaccctcggagtaagccggccgccgagaaagttcatcaaaccctcgcccggtcggccggtcatgaggaggccgctcaatgcgcgcctcacatcgccgtcctcgccgtgttgccgaagagcctcttcgatcgagatgacccactcgcgcgtcgccgagccgccaccgtttttgcctgcccaggcttcgcggaggttgtcgaggccaacggcgaggtaccgcagaaggtcctcgagggcggtcgccgtttcggcaaagaggcggacttccttgcttggcactccgctaccgagcgacgcaaggggcgcaagagcgaatgatgaagggagagggaaggtgcccgagagaaaggggtgcgacctgggcggctcgcccggctgagcgagcgtcagagtgaggagcgaggctcgcggtgcttccagcggcagaggcggcaggacggcatgcgcgagacgcggcagcgagggcttcaggtaggcgggttcgctcggctttagcggagctgcagcggcgccgaattgggcgaagggcatgaacgaatgagcggctggagctggcggcggttcgtgcggctggaggtacggcagtgacgtgatgactgagagcgccgagccaaactgaaagaaaggacgggtcagaggagcatagagcagagacaaggtgaacctgaggtagtactcacgagagcaggcaccgcctctgctgtccatgaccagtcgaccttgacccggccctctgtctgatcctctcggcctttgcctttgaccgactccggcaaatgaccgagacgtggagcatcgacagactggagtctctcgccatcgtggacagaatggatctcgagcgtcgtcttgttgtcgtccgcgacgtcgcgtacgtagagggcgaggcggaggcctgaccgacgcgtcgtcgcgaccgatgaagaatggcgaattcttgccgtcagcacgactcttgtctgggaagcgcaagtatgacacgcaccgtccggactccaaccgaggccctcaatccagccgccgacctctttggtccagacgcgagggccgccggcgagccgccagagggtgacggagtggcctttgccctcagtcgtcttggtcgacggcgcgcgcgagacgagcgcgacgagatccatgtctgggttgcaagcgtcgggatgcaagactgacggcgtcggcagcgagagcgtcgacatcggcgtgtacgcctggagtgcggccatcttcccctgcgagcctcgtcggtgatggaggatgaggggttgagaaggggaggtcttgcggaactgcgccgggggttcagcgacgacggacagcccagcgaaacctgtcagcgtcctcttcgctgcttgagatggtggactctcggacgcaccgggtcctgcgagatgtcttcctggccagatgagggtcaatgtagacgaatcgaggtgaccgtcggccgcaacctcattgctgctcaagtcggtcgcggtctgagccgactgccatcctgccattcacgacgaccctctcccttcgacccaacttccatccagcagcctaccccacccctggcttctgagcaggccaagcttgatcatcagcgcgctccctctgtgcccttgtagccgcttccgcctcccgccccaccagccctcctgccttcgccggcgccatgggtcacggctcagaccggctctaccttacgcacgccgagcatgccagcgggtcttacactgccggcaactctggcttccagggcaagaagaagcagaccgagtttcagaactgtgcatttgcctgctcgcgcggctctgccacttgactctgatcctgaccgtcgtcccggcctcgacctcgcacagtgcccttcgattgctgtgcgctcagtctcgtgcccttcaccgtcccggtcgctgcacgggaggccgacaacacggcccacgtatttgaccttgtcaacatcctgccgtacatcaagaagtacgagctgagtgcgtggcggccggcctgaactgcgtcttctttcgcgagcgcaggctgaccactctcgtccactcgcagaccccgtcaccggccggccgctcgcaacggcggacctcatcaagctcaagttcttcaaaacgccctcggggacgtacgccgacccggtaacgttcaagccgtttacgccgcacacgcacatcgtcttcatcgcctcgtctggcaacgtctttgcgtacgactcgattgagcggctctgcatcaagaccaagagctggcgcgacctgattgatgactcagtcttcaagcgcgaagacatcgtgacgatccaggtgcgctagaacgtcgtgatatatcctcctcaatcgactgatgttcgcccgaccaccacgccaggacccgcacaacctgagctcgagggatctcagccagttcgactacgtccagacgcaaaagtcggccggtgtttccaaggagcaggatcgtctcagcggaatcaatgtcgccgccttcggaagcgccggcaaggtcctgaaagaagttgcggccaaggtgcgttgatggcaggatgagaatcttaagctgtccctttctgaccgaccgaggtcgctcggtccatgcagaacacacccccaccatcaccgccacctctggccgcagtctccggcgagcagcccgaggcttcgggctcgggctcgggctcgaaggagaaaaaggtcggcatggtcgcggcaaagcccaagacggcgaccccttgtgagtcggcggctcacgaacgtgagagagggcgtgactctgacgactgacggcttttcccttccgtcccacagataatgccgccggctacacgaatggccgggcagcggcgagcctgacctcgacggcggccgacatcgagacgggctctgacctggccatgatcgacgaggaggagtgtgcgtcttcttggtcttggccctctcacaaccgctgttgactcagccatcatcctctctgcagacatgttcgacgaaatcgcgaatgtgacgaaggagaaggaccggatcaagcgcaaggcgtacgcccgggtcaacaccaactttggagcgctcaacgtcgagctccactgcgacaaggcgcccaagacctgctacaattggatcatgcttgccaaggccggccagtatgatgggtgtgttctaccccgccactcgcagactgcctgcgcgccagaggcccaatacgctgaccctgctgcctgcctaccgccagcgtcatcttccaccgcaacatccccggcttcatgatccaaggcggcgatccaaccggcaaggggaccggcggtcactcgcactggggccatgccttccgggacgagtatgacctcaagggggcgctcaagcacacggagcggggcatcatgagcatggccaactcgggcgcaggcacgaacgggtgcgtctggctgcagtatagccgcgtcatcggggctaagactgacacccttcgttctgcaccctcctcggtcgacgacaggtcgcagttcttcttcacgtaccggccgacgccccatctcgacggcaagcacactgtgtttggcggccttgtcggtgggatggaggtcctgaatgcgctggagaaggtgtcggccaaccctgcgaccgaccggccgttgaaggagatcaagattgtcagcgtcgagatgtgagtcgcctctctttcccaacgcctccagggtcgcctgctgatgccttgatcgaccacccggccctgcagtttccaggacccatatgaggcgttcaagacgcggctcgcaaaccggatcgcggcttcgtctgccaacgtgaccgagcaggagcggcgagaccggacgcggatggagcgcgaggccgaccggacgtcatggttcggtgaggacctcgataagaagaagactgccgctaccgccgccgcccagggcgcgagcacgggcagcgtcggcgcgggtgctctcgctggcgctggcgtcggcatgtacctcgccggcgcggtcggcgccaagaaggataagaagcgcgtgccagacgagagccgcgagcccgagaagaagaagcgcaagggcgccggcggcggctttggcgacttttcgagctggtgagaatggtatgtcgcccttcgcttgacgtgccggtgcgcttcgttcagtcgccgctcccgcaccttggcgtcccttttttgcctcgacgacggtggcgtccgatccgccttgcactgttgggcaagaaagagcgtgcgccgccagctgggtcgtgggccgaaacctgtttggcgaggcgtggacgacaagcgtggatgagcgacggccctgctgcgcgcacacgacccgcccgccaggccgactcgcccagcttgccttcgacagagacgaattcctggggcctcagccggtcgatgcacggcctcgcaagaggctgcctcgacctgtcaccctcgtcaagctactgagcatgtcgactcaatggtggtcggcgacccgatcgccctgcctcaatttcggtcggtcgtgcacgccgagcgaataagcatgcgggacgaaattgttggggtcggggggcctggcctctggccaactaggggctgagccgaccatggaagtagtcgagcaggtaggcagacatgctgctcctaccgtcttttccccctcctgccttgctcttgagcgggcgaagtgcagccttattgaaactcgagtcgcgggtgtcggaccttttgctgctgctgcggctcttgcacgcgaggccgccggccgccttcctccgaaacgctaaacgagtgacctccctttcattcgagccctgtttggttccttttgcgccccttgcttccttgaaggcaagcagcagagcacgcagaagaggcaacaggcaggctcggccctcctgccctctccggcgacgcgtcgaagcagcccggcttcctctccgtcaacggccaccctcgctcgctcgctctccccccctccgcaacctcctcagcacgtcgcccgtcttctctgctcggcccggccctcgcttgccttgcctcgcacactcgacgcgcgccgtccgccggctgctgcccgcctccggccccgattgcctttgcttgcttgctcgcccacccgagctgtcgttgtccgcaagacccccctacccgctcccgccttccggccgaccgccgcctccccactcgctctcttcgcgacctctcggacccgtctcgtccttcgcgctagccatgcccaagatcctgctcgagcatcagctcccgtcgaacgcggcgccctaccgccggaggcattcgagcaacacgtacctcggcctctcgccgcaaaagcggcagcgcgtcggagcggccgtcgtcgcgacgctctgcctcctctttttcctgacggtctcgaaccggtcgagagccggagccgtcgacggcctcgacgccgaggccgccggccagtacggcggtgtgcggaagcagccggcgccggtccgggcacagggcgcggtcctctttggcggcctcaagccgccttcgcacatcgtcgaccctgcccgtgagctcgactcgacctcgggcggccgggccgttgagactgtcaaggagaaggaggcgacgcccgagcccaaggccaacgccatcatggaggaggaggaggagctcagcatcgccgagcaagaggcgctctacttcagcccgccggccggtgcgtccctctcatccttgatcaggtccatctgccgagcaggtcgctcaattaattcgttgctctctcaacagaggaggtcgtcgtgccagcccacatggagcccgaggcgcgcaagcagcagctcaaggcactcgtctactttctctcgcagggcggcttcctgccctcggcccggacgacgatcgacccggacaaggaactgacgctcaagtaccttgaggcggtcggctccgagtttgacgtgccaaagagctcggtcgactgggcggccaaggtcgagaaggcctacccgctgatcgttttctcgaaggtgtgtttgatcaaccttgcgagctgcttgcgtcgttgaacagatgctgacagccccctcgccctacctttgcgcccagtcccactgcccctactcgaagaaggcaaagacatatctcaagtcggtcggcgccagccaggacccatacatcatcgaggtcgacctgcgacgtgcgtcctgctacgtcctctttttgctccctttcctcccccttgctgacccttccctcatcctcctgaaattcagctgacgctgacgcgatcaagcacgtcctcggccggctgacgaaccgggcgacgttccccaatgtcatcctcgcctttgagcctctcggtggcggcgacgacattgagctcctccatgccgagggcggtctcgcccgcaagctccgtgagggcggcgtcaagtttggcaagcggccgagggccgacgtcaacggccagcgcttcgccttctgatccgtctcccttttctcaccgccgcacactcgccggcctctttggcccgtgttgtaccgcatagacagacccggtagacccatctttctacccaatccgcagcaatctctctcggctgccggaatccggccgtgcagccttctctcacctcgtctcttgtaaaactcgcatgttcaaaccccctcggatctctctgtttatgaatttgtcttgtcacactgcctctgcctcggagctagagcggacgcataaagatcgagcagtaagggacaggtggcaggacgaggcaaaaggctatagcgagagaggcttcgcgcgcgagggtggtcgtccggaacaacatcgggtggagactcagttcggcagaaagatgatcgggagcggctcggagggtccaggaggttggtcgacacggggcgtcgatcgcgcaagcatggagtgaagatctggccggcagtcgtcagtcgtggaacagagggcgctgagcctcgataggcaacgacgtacttttgacgagatgagacaagaagaaggagagatctagatgacagacagaaagggcgaggggggcagcgggggcagcggaggcgcggtgcctgaccggatcgtgcatgcgcgggcctgagatagctgccggtgtaagcaataaggaggtcaaactcgtaatgtatcagagcgggcggatggagaggaacgcgttgcggctgacctgtggtggaactaaagctgcaagcgcggctcggcctcatcgagcggccggcgcagggttcgctgcaggagcccgcttgaggcagtgccggccgtccttcgcgagggtgaagccggggtcgcacttggagacgacgcagacacccttgtcgcagccaatttcggccgcgtgggggatgaccgtgcagtcctggctagagaccgcaggcgcgcgcgcgagcggggatgagaagaacgcgtcaatcggtgggaagtctcaagcgacgcgcaaaccagacgcaccctaggccgagcgacgtgcagccgccgcacgagacgagctcggtctgcgtatcgatgcagtcaaagcccgccttgaaccagtcggcgaggaccttgagctcggccttcttcacggcggcgagcgtctcacccggggcgacgaccgggcaggcgtcagccttgtttggacagaggaactgcgagtagtcgttccggcccttggtccggcgcgtctttgcgctccgcttcttcttgcccatcttgcgcgacggctcgggcgcggcgacgagctggcgtcccatggcggcgatggcatgggcggcgcccttgacgggcgtgccgacgttggcggccgaggcggcggtcgccgcgagcagcagcacaagaagcagcgacgccagcagccggatggaacctatcggagaggacgacgacatagctgcagaggagtaagaggaggagagggtggccaggtcgagtggccgtctgctgcaggtcggagctggcctagggaccagcaggcgcgactgctcttctcgcgcgcgcagcctcgagtcgtctcgctcccctgtcgacgaccagccgctcccctctttccgccagcaagcaaccgcccctcctcaagatcaaagggagtcccctttcaacggattcgtcggccaagcagatcgtcatcggactcgactctcgaaaggaattcgcccgacactcaagttgctagccctttcacgccgacccgacctcactcaaccggagcgttaccctcgaaaacaacctcacggcccgcttcgcttctcctcatcgaccctctcttcatccttcaggcggatggctggctcggacgacgcgacggtcgccctgccggcgtaccaggcccggctgctcgagggcagccgctcgccttcgctgacgtcgatgtcgcgttcgggctcgagcaaccgacacagcgcgctcctctcgtcgccgaccaagccgtcgctcaacgccccgccctcgccctcctcgccctttgcccacggcggccgctttgcgacgagtgccggcgccaggggccaccgctcgggcgcccggagcgtcgacatcacccgcggcttctggcaggaccgcgagcaggccgccgcggatgagaaggaggcccttcggctcgagcgcgcgccgtcgacggcctcgtcggcgaggagcggcggtgcttcgcctgccgtccaccatgcaacatccttcacaccggctcgcgtctcggccgacatggcctcgtccgagtcggtctcgtccttccactcgtccgacgcctcgaccggtgggccgacctggacgccgccggtcgagcctcagtcgatctttggaggacctcgcgcagcgtcgcccgctactgccgccagcttccggtcgccctcgccctcgccctcgatggcgtctgtcgccagcacgggtgctactcctcgccggctgacgcacaagcgcaaccattcggccgcgccgactttcaagtatcagccctcggcatcgagcacgacgctcgcagcctcgacctcgaccaattcgttcggcctccgggcggcccaagctgcgacgccgacgcccgctccggcaacggaacgagcgaggacgttcgaatcgccgccaccgccgccttcgagcttcactgcctcgcccgtctctgccacgccggcctcacccgcagcgagcctctctcgcgcgagctccatcacgtcgcgcttcgctgccggcggcgggggagctcgtcctcgaccgcactccttccaccagggcacgacgtcgtcgcttgccttcccctcctctgcgaccggcacagtagacgccaccgacgaccggcccgtcttccagtcggcctacatgcgcgagcggcagaaacggctctcgcagacgtcggctggcgatagctcggacgctgccagtttggccgacacgccgccgaccactgcgaccctgcccgacctcggccggccggcatcgcgctcgtccgtccggtcgacgtcgtcgatcatctcggctcatgcagagagcccctcgtcgatcccgagcatcaaggagccaccgctcggcgcgcgccgaggaccggccgcacggctcggccgacacatgcctcgcatcgcctcgggcgatggccagtttgacgaggaggcgccgtcgtcgtctgccccgatgccggctcggtctaccgctgctgctcattcgcattcgcttggcccctcctactcggccggccgctggggcgagggcgtccggtcggtcggcgagggcgacgaggtcgtcggcatgaagggccgacgccgacttccgctcgcgtcgtcttcagccctcggctcgggctcgtccccggcggcgtcggccggcctgcgaatctcgacctttgcgatcgaacggacgcgcaaggaggtcatcgccgaagagtacctcacgcacgttggcgaggcgctccagtgggtcgagggcgtcctccaggaagacctcggtctcggcgtcgtcgagttcgaggagaagctccgggacggcgtcgtcctcgcaaagattgctaagcatctcgacggcctcaagaagggcgagaagatttttgaggtgcgactactttccggtgcccgccctgagtggcagcgtagctgactgtcttgccggtggccgacctacctccagcatccgaagctccagtggcgccactcggacaacatcattctcttcctcaactttacgcagtcgccgctcgtcggcctgccgaagaacttcatctttgagacgatcgacctgtacgagaagaagaatttgcccaaggtcatcttctgcattcactcgcttaggtgcgaccggtcccctctcgcctcatactcccgcgctgcgcgtaggtggattgacctctcccttcttccagtcacgtccttgccaaccggggcctcgtcgagaagattggcaacctcgctggccagctcaactttaccggtgcgccctcagcgcctcccccgcaaaacaagccaccatcctgacctcgcttcttaaccgccgacagatgagcagctgcaggcagcttcaaagggtctctctggccaggcgatgcccaacttcaagtcgatcggccaggatcttgccaaggagatgaatattgagccgccgcccgagaccgaggaagagcgtgcgttcatgcgctgcccgccgaccaagaggtttgcgtctcactgatcggaacatttttccatcaggccgtgaccggcttctgcacgaggcactgccagcgatcaggtcaattcaagcgcaggcggtcggctacctggcacggctcgactaccacgaatttgtcgacgaggtccgcgcggcctcgaccggcctcccgcaccttcaggcgagcgcccgcggtgccgttgcccgcaagcagttcaatcggctcgctgctgcgcgcaaggaccagatcacgccgatcgtccggcacatcgccagcttccagggtgtcgcccggggtgcactcgctcgcagctcgcgcgctcaggagcgtcagaccgtccaggcctcgtccgacgtcgtcaagcggctccaggctcaggcccgcggcacgctcagccgtcggcactttgacgagcacctcgacgacatctacctgcgcgaggaggtcttcggactcttcgtggcccgcgctcagggcgcgctcgtccgccgtcaattccgctccaaggcttccgccttgaccgaggtcaatgtccatgaagggttcatcaagtttggcgccctcgcccggtcggcgctcgcccggcgcgaggtcgccaaggtcaaggccgaggtcaacgtcgtcgccccgtcgttgatcggcttccaggcgcgggccaaggcgcagctcgtccggcgcaaccatcagcagctcgcggccgcgctcgccaacgtgtcgaccatctcgtcggccctcaagtcgcagtcgatcttccgggcggccctctcgcgcgcgcgcaagggcgagcagaagaaagaggtcgaatttgttctgcccaactttgtcggcttccaggcggccgctcgccgggcgtaccagaagggcgagtacgagtggtggagcgatcacgtccgctcgcacgcctttgtcgccgtccgactccagacgctcctgcgcggcgcgatggtccgcaaagccttctacggccggctcaaccacttttaccgcaacatggaggccgtcgtccgcctccaggccatccgccggggcaagggcccgcgcgaaggcttcaacggcatccggctcggcaagaatgtaaaggtcgcaaccatcaagaattttggccacctgctcgacgacaatgacgccgagtcgaaggatgaggcgctcctcggctcgctcaggcaggatgttgtcgccgtcttccgcgagtcgcaggcgctcgaggccgacgccgaggagctcgaccagagcatcggcctctttgcgcagaacattgcccagttccaggggcggacccggacgagcaccggctcgcgaccagcaagctcgtttgtcgaccctttcaacgcctcctcgctcgatcgggcggcccagcacaagctcgacctgtaccagcagctgttttacatgctccagactcggtccgacctgctcggcaagctctgctcgcgactctcgaccgacgtctcggacccgtcgcgcaagctcgtcgagtcggtcgtcctcgcgctctttggctatggccagggcaagcgcgaagaatactgggccatggtgttcttccaggtaggcaccgtcgtcgtcgaacctgacccgcatgcaaatcgtgttggtctgacccctttactctcttccagagcgccgtttcgcaccaggttgaggctgccgtacgctttgacgacctgctcgaacagtacttctctttcgccaagatcgccgtccaatacgtcaagccaaaggagggcgcttacgtccaggagctgctcgggccgctcgtcaatgacattgtcgccgacgagcatctcgatctcgactgcgatgccgtcaaggtgcgttttcgaatgaagcgcctcgtagtggcctgcccatcaagctgacggggccatcgctcgtccctttgcagatctttgaggccttccgccggcagcgcgatgccgcagcgggcgtccagcgctcgtatcctgagccgatcacgcacgtcgaggccatccgcgacccagaaacgcggacggagtatgtgcatcgtgagtgttgcccccgactctgtccttctattcggccagcagagctacgaggattctgagcggtgtctatcgcctctccaggtcttcaagcaacgcacgccttttccaagaagctcgtcaaggccatcacctcggccacccagaagctgccctatgccctgcggtggatcacgcgcgagatgctgctcagcctacgggtacgtgccgctctcagctcgctcgacgtcatcatttggagcaaaacgctcaccttctgtctacagcgccgcttccccgacatccccgacgagaccgcggcgctcgctctcggccgcttcattttcctccgggtgatcaagccggcgattctgtacgtccctctcgtaggcggtcctgctttctctgcgtagaacctcactcgactcttgcccttcttcttctcagcgttcctgagacctttggcatcgtcacgacgacgatccagcctcgggcgcgggccaacctgcgcgagattgccaacctcattgatcaggtgacactatgcaagcgttttgagatgggcaccaagatggagccgctcaacgcctacgttgacgaggacggcgtcgtcttccgcaactggctcatggatggtgcgtccctgtcacctcttcgtgtctcccttcgagccgcgacctgaccgcacttcgaggacattctacagtcgccgctgtcattgacgtcaaggagcacctcggcgtcgacgagtatgtcgacgtcacggtcgagcccctgccggtctcgatctcggcgagcgagatctacgcctttcacaagctcctggtccaggacctcaatgacctcgtgcggcccaaccagtctttgcgtccccgatcacgttagacctcgtgctgaccgccctccctctcggccccctgcaggacccgagcggtcaggaccgtctccgggcgctcctctccgagctcggtggcccgcctcttggcgccgacatccccactcgggacaagccgatctcgctcaagctcgtcaaccgcgccccgcccgccgagggttcgtccttagttctctgcgcctcctcttcagaacgaccgctaacctgatgcttcatcgatcttccagaccccgaggccggctccaaggctgactggtcgcgcgccaagcgactgatcctggccgtcctccgcgtccagccgggcccagacatcctctcgtccctcgtcgccgaggttaccgacgagtatctcgacaagtgggaccagattgcgcaggatgcggctcacggcctgccgccgctgcccggccagcagacgtacaacctcaacgacatcaagaagtaaggccgccctgctgttcaagcttaaccgggcgtacaaacgctgacactcaccacccgcctcagcctcccctacgacgaggttaagtatcaggcgctgctggcttgccaggcgctcgagcagcggggcgtcatcacccgcgccgacggctaccaggcgatcctggactcgatcgcctacgacatccggaccaagaaccggcgccagatccagcggacaaaggagattggcacgatgcagcaagcgctcggccgcttgcggcagaagaagacggacctcgaggagcaaattgcgatgtacaacgcacacaatgcgcagagcatctccaacatgcagaccaagaggtgcgcgcgcacccccggcctgggctcgcgctctgcaggcaacaagctgacgcactctcctcctgttttagcaaacggagctcagtcatcccgctcggcaagcagttctggcaccggcggagcttgcagcagcacggccagatgcccgagtatggctcctgggtctacccggccaagtcgctcgtgagtgttgcgcggcgagagtgccgtctgcccgcttgccgaggctgacaccgaaactacctgttcccggcagtactcgcgaggcagcctcctctcgatcgaccagttctcgccgacccaattcgacaaagtcgagatcatcctgtcgtcgaacgaggccggcgtcttcaacgtcgagatcatgttcacgccaccgggccacaccaagacctgcgtcgataagtcgtcggtgacgatgcacgaggttcgtccccccttcgccgacctccatctcctttgccgataggctgaccatgcccccccccctccctctgtgccgccttcagctgctgcagcggcagcgcgaccgcaaagagagcatccggctcggcctctccgacttcaatgtcaatctcttcatcgcccagctcaacaagagtgcgtcctcggcccgtcgatccttcgtccatggcatgagctgacatcccttaccgcaactccagagttttacaagaactagacgcacaccgcggacccttctcttccccctttgcttcctctgctgccaccctcgtcctgctttgatacctcgcccgcgaaccctctgttaccctcatgccgccgactttggacttgccctcgggctgccttcgcatttcgactcttcttccacccctttgcagacaacccttcgcccttgtctctctctctatgaatgttacaaaatagctcatcaagagcagcccgaggaaagcgagaagagaacggatgcgaacggtcaggccttgagctggttggcctggatcacgcgacacagactatagacgaggcggagcatcttcatgtcctcgtccttgacgccgaccctgcggcccatcttgaggacgttgccgattgtgcctgaggcggaaaatgaagatcgttctatcagcgtcggcggtcaggagacgggttcgacagctcgacaagacgcacactcgacctcgaatggccgcccggtcaggatgtcgacgagggcgctcggcttgtgcgcgccgcccttctggcggtaggcgatcgtcgcctcgtagagctgcttgccccaatcggccggcagtgcgagattggccgtgtggccgatgttgttgatctcgtcgcagaattcaagcacgctcgggccgacaatatcaagtagaggcaggaaatccgcaataggagcccggaccaggcacgccagcgaggcccaaacgcaattccaggtgttctgaaaggagtattcgacagcgtttcagcgcgagtggtcgacagggtcccgagcgaggctgcttaatgagtgaggctaccccaggacccacgggcctgcgcgatgagcgaggctgcccgagaaactaaccttcctgaaccgaaacaactccatatcctgctcgatgtcgaccgcacctccgccggcttcgaggatctccttgaacttgctgagcgcctcggcctggaccgccgttggttcgggcacccacgccttggccgaagcattcgtcacgggcggccggccttccgtcggcgggtggtagacgcccatttcgagccgctctgtccgctcaaagagcacctcgtcacggttgccaatcaggctgcgaggccggaggcggtcgggtcagcttagccagaaggaggatgtcattgcaacgcaggaccgacttggtcgatatgtgaattgtcgatgagatgactgtggcgtcgagatgtcgcgtcgcagcatagaggccctcctcgatgccaaggccgttctggagggacgttgaagcatgtcagtccctcggatgactgggccactagagtcatggaaggcgccatggagggcgccgtggagggcgaactgacctggatcaggatgaacgtcttcgacttgtcggcatcgatgatgggcttgaggagaccctcggtcggcgagacgtcaggcagcgacttggtcgtgcaaacgacaaagtcgtacgctgtgtcggccgcagcctcgaccgagttgaccactactcaaaggaaggattggtcagcatctcgcaagacgtcgaccaagggctgggggcaacgcacggcgatgcggcttgaagccctcgatcgtcccaaacttgtcgggactgctaatcttgatgcccttgtcctggagcgattccgtcagcgcgcgcgtgtcgtccaggtcagtgcacctcgaagcagagcacggaccttaatgaggtcgtagttgccgcgagcgacggccgtcacctctgcgccgccctatcataccagcaacaccaagcccgtcgggtcagcttcgacaggagcgacgacaaggagggccgcgagatggaccttctcgagctcgtaagcgatcacgacgccgacggcaccgtagccgacgaggaggatcttgggaacaggggtggcggtcatggctactgggaggaaaagacgctggagatggtgctggtgaagcgttagccaacgcaacgagtcggtcggtcgtcgtcccgtctctccgagtgttgctaggcgcgcaggccggcgaacgccgaggcgcttcgcttcggagggacgcccgagcccgggctgagcagtcgggaggaggagagtgcagctggaacctgcaaacgctcactctatacgctatcttcctctctctctctctgctgcacaccatcaacaatggactactcgagcttcctttcggtcgagtcgtcgtcgcgcaagccgtcgccgctcaaggccctcaacctcaagtgcgtcgccctcggtcttgcctccgctgggctctgactcatttggacgaagcgagccctaagctgacatcgctcgccgtctggtcgtctccaggtacttctcccaacccggccagatcagcttcggaggtggtgagtccgctcgctctgcctctggatttgaaggggacctcgtcggctgacttcgtcgcgggcaccatctctcgccatcggcaggcctgccgcatccgttcgtagcgctgctcgatccttctctgatgggcttcggactgacatctcggtccctttgcaggtcgacctttccggtcaacgaggcaacctacttcttcccgtatgccggccagacggtcaccgtcgacggcaacgggccctcgtcggcggccgagtcgacggcgacccgagggtccgacaacaagaacctctttatcccgctggccagcgtcatgcagtactcgtgcgtcctaccgtcgttggattctgcggaggctttgagactgatgtttcgcgcactttagcgggagcggcggacccgccaacctgctagcgttcctgaaggagcacatgcagcgctacgccaacccgccctacgctgattgggacgtcatctgcaccgtcggcaacactgatgccgtgcgtctgcacggctccctaggccacttgagcgtcgatgagctgaacttcgctttgcctctgccgacagatggacgcgatcctacgtatgctcggcgaccgcggcgacaatgtccttgtcgagaacttttgctacgtgcgtcgccctgtggccagcttctacaatcgcaatgcctgaccgttcatgatccgtcccgttcgtagcccggcacgctgtcgggcctcgtcccaatgggcctcaagccaatcccggtcgcgctcgatgccgaggggatggtgcctggcgacatggaccgcgtgctcaacgagtgggactcgatcaagcagggcaagaagccgcagttcgtcctaattgtgccctcaggtcagaacccctctgggacgacgatgcaggccgcccggcgcaaagagttttacgctgtcgctcaaaagcacaacctgatcatcgtctcggacgacccgtaccgggcgctcgtcctcagccacgagagcgcgacgccggtcgaggcggcgccgtcgttcctgtcgctagatgtcgacggccgcgtgctcgacatctcgtccttctcaaaggtcgtcgcaccgggctgccggacgggctgggtcaccgggcctaagccgctgatcgagcgtatcctccggcggaacgaggtgacgacgcaggccgtctcgggcttctcacaatcggccatcacgtcgttcctcggcgcgctcggcggccaggatggttgggacaaatacctcgcgcacgtcgccaagcaagtgcgtccccaaccttgttcactcgctgacgtcgaacgcggtctctctactgaccgctgaaccggctcctactgcccagtatacgacgcgcgagtccaacatgaaccggctcttctcgcagtacctgccaaaggagtattgcgagtggtgcgtcggccgaggcttgccgtatcagcgcctttcacctgatctgaccgtcggcctcttcctctgctgcagggttcggccggcgagcggcatgttcatttttgtgcgagtcaaggtgcgtcggccctcttctgtcgcgcgcgaggtgatcctgaccattggctccctctctctcaggccgagaagcaccctctcctggccgagcttgggcccgacggcgtcctcgagcacgcgttcgaggcctgcatcgccgcaaaggtcatcaccgttccctcgacaatgttcaaggccgcgcccgaggtcaacagcaagcccgagaatgtctttctccgctgctcgttctcgtacaacacgcccgaggagatggaggagggcgcaaagcgtttcggggccggcctgcggcagtcgttcaagggctcgtcgaccaaggcctgagtcgaggtgattggaatcgctgtgtcttgatgcggatcgctgtatgatagccgggccaagctcagtgattgggttcggatctctcgtgccgtgagccagcgtcgggggcccattgagcagggcttctgaggttgaggcgccgctctgcttccccctgacctgcaaaacagaacgcaacctcgcctgctcgcacgaccctcctcatgtcgtctcgcgccatgaagagtcgatacaatacggccgccacgagcaagaaagaaagagcgccatgagagacaccccccgcgcgagaggcgggcaaagcgcaagggcctccccgctcatccctttcgccctttgtacaatgcttgaggatccggtcgactcctgcacttctcctgttgtcagagttggcagactcgcttagaggccggctaaggagatcgagggagagaaagctcttcagtgaagggctcggatcgagggcaaggcaggcagggggagggtcgcaccttccggcgtctgatgagaatgggtgcaagagagacgccaagcaggtcagtaactcaacgagcggcaggcaggaaccagcgaggccgctgatggctcgatgacggacccggagaatgtagtcgacagctggaggtcgcgagagaagggcttcggtgtcagcacgggcgctcccaggcgaagaggcgtggctgcgtgctcaccctgacggacggtcctgatctcgtcagcctcggcatcggggatctgttcagagcgttgacaaagcaaggaaggcgaccatcgtcagcaaaggcaggcgagacgagcggagtcgcaagctgccgcctcaagaatcacacaaacgaacctcgatgaagaagtcctcctcgatggccatgatgacctcgacggcgtccagcgagtcaagtccgaggtcctcggtgaacgaggcgtcgaggctcagctgcaggcggacggacaggagagaagagggagggggcatcagccaatggtcgctgaagcagatgggtcggggcggcggaaggttgacctcgccgcccccgccgccgaggctcctgaagacgaaccttgtcctgcttgaccttgtcaaagccctggaagatgtcgaggatgcgggcctcgacgtttgccttggagagcgagcggtcgggcgcaccgggcgcaccgccggcgtagaagcgggcggcggcgacggcagccagcggggatcgggacgagccgacaagggcggccggccgggcggcgacgaggggcgacgctcgcggggcggcggcgcggacggcgagccgggaggcagggatggcgagacgggagaacatggtggatgagagagagagagagagtgatggatggtggcgaagacggagcaggagagggagtgcgagctggctggcaaggacggcttgctcggaggcacgcaaaaccggaggcttcgtctcagtcgtttgcgcgctcgccccgccggcccgctcaggcaaagcaagcaaggtcgaccatccactatgcttcgtacttcttatacgagcgcgtgttcgagcttcgaagacgggctaccgaaagcgagaataaggaaatgtctcaacggcgaagagcgaagatttcgagcagctcttgcgcagggcgtctctcgttgctccaaggtcactcctccctgcggactgactgccagatcttgcctctacgaggatcgcacgacagtcagacgacgggttcccggagctcacggccagaaggtaccgggagagaacatgcactctacgagtcgtcttcaatcgcctctatccgctcgctgacaatcatcaagttgaaaagctgtttgatacagtgctgggacggacgctaggtaggtgcgtttccgagaggattaaggggtgaaggcgtaggtctaggtgttgagaagggagaggagggagagctttgaagaggagagggtgaggggggaggcgtcgtgcggcgaggcgacggacgaccccaggaggatctgttgtgccgcgttgggcggcacgaccggcgacgctgacgccgacggctcgcttgagtgacgatgctcggcttagtgcttgggagccatctgctcctgcttgggctcggccgggttgagatagccgatggggacgtccatgccattctcgcggttcgtccagaggagcgtcgagtgcttcttggcgagcaggtagagcgtgacggtgtaggccgcgcagaagaaaaagccgatccagctgacggccatgagggcgcgcatgaggccgccgcaggcccggaagatgttgccggtcggcgtgttggtagcatttgagcagtcgtagatgccgtggttgcggagggcagagtatgagatggcgatgccgagataaaagagggtaaagaaggtcgtgacggcgaggacagtcttggttttaagggccgacgaccgcaggctcttggcgacggtgatgaacaggaactgggcggaaggaggaggaagcaggtcagcaacaattcgaccgacacgcagggaaaaaaaaggcgaggaagcaaactcacgtagaggaaggcgaggacgccaagtacgattgccgctgggtcaaccttgaagtaggttgcaaagacggtgtggccccagcggatgctgatcgccgcgaggacgaacaggctgaagctgaagacgagcgcgagcgagcgcgtcaggctgttggcaaagtcgatgctgcaagggccgcggaggagcttgtcaacaacagcatgtgccggatgcgggaaggggcggcggctacacacgaggcagacatcgttggctgagtttgaaggtgcgcttgggtgtcgagcttgaggtcgagtaggtggacgggggagcggcttgaaagtcttttgagcttgggatgtgggtggaggggagaagggaagaagaggtttcaggcaggctcagcttaagagcggctcagtcagtggggctagctggagagggtgggcaaggcgcggcaagaggttgctcagcggcagggcgggcgctcgtcagcgggttcgacacaaggggcattcagcgggcgagggatgccgctcctgctgcttctagctttgagctgcgtcatcccgtgtcagccgagctctgacggcgtcagcggggtggaacgctcggccgggcgtggcgaagagagtcaaagagtggccgagcgagcgcggagtaccggagtcggggagacgcgtctgcagggggcgagcgaaatatatcaaaggctcagcgtgtcgtcagcccgggaacacctgccggtgcttccgcccggctgggcccgcggctccgtccccgtcatcctccggggccgacctcaggcggcggcagtcgtcagcccagctgagcccaggcataccaagctggctaacggagtcaagaggtgatccagcgaccgacagggctcgcatcggggcgctgctggccagcacaagaccatcagcctgagaaggtggtcagcagagtggccgaccgagctgaccgcaagacgttgctgttccgaccttggtgggcgacgtacgtccgtcgacgcaccaagagggacgaggccgggcaccattacgtattatgagggagaagcgacgcagatcggccgacgaggaggccgccggccgagaacgaccgccaggcgagggtcaggaggaaggaggaacaagggcatggagaaagtcggcgggcggcgctcgacctgccgacgcaagaggatgcatgagagagagcgggaagagagcgacgacacgaagacggatgctgacgaccctcctcagatcttggcctgtgtgcgagtcgcaaggccagagcagaggtcagtgcctgctgacgacaacgacgacgacttcaacgctcggacggccttgaactctcgaacggccggccgaccgaccgctcacctcagccttgacttcctcttgcgtcacatctccaccagcaggtggcgcctgagggcagagccatccaacggcgacgcccatcccgtcctggcggcgcgtcaacgcgagcttcgggtgttgtcggcagagggcaaagacagcggcgaggtagccggcgatgaggcccgactcgatccagcagaaggcttggaggctgcgcatcatgccctggcagccgggacttccggacgggatgggtgagaggtcaatcatccggacgactcgcacttagacgactcagacgacgtacaagccgtggccgggaccgggcgcgaagcagtcgtagacgccgtggttccggagggcgctgtacgagacggcgagggcaaagtaccagacgagaaagaggccgctgatgagaaggacgttgcgcgcgtggaagacggttgaccggctgcgggtgaagacgacgaggctgcaggttgtcgaggcggcggggagtcagcgacgcaggaggagcgatagacgtcacgcaagggacgagaaggaccgacccgaggaaccacagggtggcgaggataccgcagacgagcaaggccgggtcgatagcgaagtaatttccccaccggcgctcgacgtgccggaggctgatggcggcgaggacgaacgaagagaaggcaaggacgacggcgagtaggcggaggacgaaggcgatcagatgaagtgtgtcgactgaaggggacggcttgaggtcgctgcatcgcgagaggagaaatagcaggagggcgtggtcaaccgtgaaggatgggcgatggccgggcaaggcggagtcgagacgagaaaggggcgaggccggtcacctccaagcagaatcaggacgcacgtcatggcgcggactggcgcggtgttttgcaagaaagacgggcaggagggtctgggcttgtaggacgtagtcgaggaggacgtcaggtcgggtgtgtaatggtcgcggacggcagcaggccctcgaggcggccagtcgaagagggtagccgaccttctcgttcgcgcagcagtcccggagatgacggaaggcgcgagcccagacccttcttgacttgctggcccgacctcatcagactttggctcgtctggcagcggacgaagcgggcagcgacaggcaacgcagcaggacgttacgactcagtcattagatcgaccagcccgtgtcgaccggcctgctcgctcggagacccccccgcgcgtctgacccgaccttttcgacccgacacggacgctgatctagttctaggcactgtggaaagtgcagcctgtgagggggggcgagtggagtcgccttttcgagtcgtgattcccgccttctacctggcggtttggtctatgggcgttgagcccctggcatgtcgtgcgttcgtccggccgagcgcagacctcgttaagagacgcgctggatggaggcagaccggacgggccgtctccttcagacggcccttacgactggtagtcgtacttctcgtagaacgtcttggcgtctcgggtctgtgttaagcagggagaagcaaagccgtcagccacaagcgacctaccagctgatcgcaggagcagagcgacggacgtcagtcttaggcccacgcttccggccttttgactcctcggccttcttgcggagcacccggtcggctttgagccagtcgagcgcgaggccgagcagctggctgccattctggccgtcggccttgtcggccgccggcggccaggcaagcggcggctgggggatcgagccgagctgcatgtgcatgacggccgtggggaagatgtcgaggccgtcgaaaatgtgggtgcctggggccagagggacctggtcagcgaggtgatggaatgatgaggcgaatgcgacagggcggatccacagtagacgatggtcgcgttgcgctcctttgactcggcgatgaggaaatcgatcaggtcgccccggacgaggacatcaaggtcgacggtaacctcgtcgaggaggaggatgtcccagggggcctgcaggaagaagatgtcagcttgaaagcgttagaaagccttgctaaagcctgagttgcacgcaccatcaggcccatgacgagctggacgcgccggcgctcgccgtccgagatctggtgcatgtgcctgtccagaaaggaaagtcgagggtcagctcacagtcgccatcttgcttccgcccctggcagacgcaccagtcgagatcgacgtcgagaatctcgagcagccggtcgcgccgctccttgtgccggtagccgccgaccgagtcgagaaagtgcgagacgacaatgtcgccccggacaacggggttcatcgcccactcagtcccgaggtaggtgacgccggcgggcggcgagcggaagacgtccttgccgagcaggagggcgtttgcgtccgggacgagccgcttgcccgcgaggatccgcaggagggtcgacttgccggctgcagacaagtagcgtcagtcccggcaaacagacagcagcgacagcagtcgtcggagagagctgtctttcgaaaacgcacctccgttagcgccgatgcagaggacgcggctgccctgcgggatggcgaggtcgattgagtgcagagccggctcgtcggcgtacgagaacgagagcttctggacgtcaatagccaggagcgaggggtcgttggcggaggtgtttggtgtggacgacatggctgaagtgtgtgtgagagaaagagaagaggcggagtgagggttcggagggaaggaagcagcgacaggacggaaagaaaggaggtctgtctccagatcggcttcgcgcgatggcctccccggccgttacgatgacccgcgacctcgtgcgtaacttcggggggtttacgacccaacgtaacacccgcctgccctttttcgagcttcgcccggccgacgcgagctctcgtttcctgtccctcaaccgcgatgccgctcgaggtccgtccccctcgtcgtgtccgtcacctcaagctggtgcgcccgctgactcgtcctcctcgctctgcctccagagcagtcgaaaggctgcgaagctcgtccacagaactcgaactcgctcggtcgtcgtcgtccggcctcgtgcaggggcgggtcgggtcctccctccgtctctcgcacttggattgctcccggacacggctcgctcccgagcgcagtctcgtccctcgcgagcgggaaggtctgagttttctatacacgcccccggggccttgtgcctttgaacggtcccagccggacccctccctgaccgcccttccacgggcctgggttgaagcgacgcgccagccaacccttcaccgcccttgcgccgcccctttcgggggagtccaagatccgtctctctttctgggagcaggcgaggagactctttcttcgcaagaggaacggcactcgggctttccagcggtgtttaaagcgtcgtgggcgtttcgtcccgtctctcgtctgccggcgcccccctcatcctcggatgaggtcgctgggtcccctcctctctggagcgcgccgaccctggggtgttggttccctctccgtggccgtcaaacagcccgaagtgttgacgagcgtaagactttagtgcaatctgcagcgcggattaccgtaactcaattcagactattcttcgactgctcgaggcattcgcggttccccccctccccttcgacaccggccgtcttccgctcgttgagcggcggcgtccgggccgtccggacactcgggtgggggggtcgtgcgggtcatgcgatcgtcaaaagcagcgggtcggggatgcgttcgtcgacagaggtcgtggtcgtagcggtcgtaagtcgagggagagtgtttggtcgtgggcaggaaggggtagagctctcgtcgctcaggtgagatcgacgacgtgtaccgaggcagggaggccggagacgaccgtcttgtcgagcgaggcaataaaggccggcacgcgccggagcgactcgcacgcccttttcgcgtcctcgcgggcgtaaagcatcgggcagtcgaccgagacgcaggcgacgggcgagctcgccggcgccgacgagcacgatgcgcattggagctggctgttgcgcaggcgcgtctcggccttgacgagctggaggctgagcgcgtaggccgtcgggatcgggtcggcccggcaggcgacgcagatggcggggactagggcggcgtcagcgtgtcagcgagagggtcaagcgagcggagcggacgatgagacacacctttgtcggtcgacgcctggcagaggaagcagaggtcgctctgaaaatggtccgtcagctttgacagtagctttcgcttcttcttcgcggccgccttcgccgcctcgggctcgccaaacggcgcggcagcgacgagcttcggtcgcggcatcgtcttgtaccactgctcgacgtcggccccgaggaggttgaggatgcgcgagaggggtgggagcaggacgcgctcgatatagtaggttgcgtcgagctcgaggcctctgcacaagccggagccggaaacgtgggctcagcgtcgtacgcgtcgactcgagcaggcagcaagttgactcactccttgaagaccaagtcctccggccgccgggcgcgcttgtactgcggctcacccggctcgcccatggtgacgacgtagggcacacgctcgcctgcagcagaggaggtagagacgtgtcagcaaacgccacgcaaaagcatgggacgaaggctccagactgaccgtactgcggctcgtcgcccgggtctttggctttgcgcagagcggcaacgaccgcatgaggcgggtgactgccctctctgtggagcgagagagcgaggtacgagtcagccgtcgagagcaagtaggagagagggggagatgcacgcacttgtacgagccgagcttgacctccttggcaaacgtgaaatcttgaaccgagacgcggccgcggatgatcttcgtccactgctcatacatgtagcgcttgacttcagagagatcctgcgtccggaagaggatcctgggcgaggcgcagggccagtcagcgcaaaggactgccgagccgcttgaagagacttacttgatgcaggcctcctgctccttttgctgcgcggggatgccgtcgcgtcggaccgtctcgatgcctggggaagcatggcgaacagtcagcagccagacgggctcctcgagcgacacgacggcggagcgactcgcccttgtcatcaaaggtcggcttctcgtccggatgctcgtacttctcgccgacgtagcgctttttggcgacgaggacgcatggaaggtaaacctgcggggggggggggggaagaatttccagatgagagtcagctgggggggccccgccccctcccctccagatttctcgctgcggccctctgcggcgcacgcacagttccggcctcatatcgcccctcatcttcaagatctccctgtctctcatgcgtctagtccggatcgcctctgcttcagcgctgaggagccatgctacagcaggcgcgcgtcacctccccttcttcttctgcgccgccgcacctcctgaccggccgccgtctgcgccaaggaagccgccggcctcgagcgcgtctcgtgctgcctggccaatgtgcttaaagcggtcgggcccgagatggatgccgccaaaatagcgggtgacgacgacgaggacgtcaaagacgtcgaggatctggagcaggtgcgcgatccgcccgccggcggccgactcgccgtcgtcgtcgttgtctggcaggagcgggaccggcagtcagcgagccgagtgaggcctagcgcttaggtccgataagcgcgtaccttggatgacggcaccttgcgagccgcgcacgcggtacgcattgatgatcggatgcgccgctcgcgcgatcttcttgtcctctagcagatgactcaggacaagcgggatctgcgggcgtcactgtggtcagagggagatcagacagcctgcagggcgggacaggacgcacatgggcgacgttggtgatgcggacggcccggccgacaaagatgctcttgcggtcgacgatcggctcggcgacgtatatgacgagattttctggcaaagcggtcggcatctgctcaacagcggccgcaggttcctcggcctcgtcgtcgtcatcggccatcgtcgagatcttctttggccgcgagtcttcctgcgcggactgcgagatctcctcgttcattaaccactcctggagagaggccacgaggtccagtcagcgtcacctatgtcatgctcgtcttacacggaccggtacgtacctggcaaatcgaccggcagtgctcgaggccctcccagagcgccggctcgccctcggtgaagggcactccctcgccgtctggcggcgggatcgagaagtaggtgcggagcacgcggccaaacaggtttgagtcggcgccgaagctgccgatgtagcggttcaggagctggagctgcgggacgtggaccgaggccgggtaggccggcgggagggtgacgaggatcgagatcgtgacttctgagttctcctcgagtctgcggcgccaggcacgccgaggggtacgtcagctcatgaagaaagggacagctcgaaatcctggaagggcactgacggcaagaccgcctcgtatcggacccgccagccggcatcctcgtcctcgccagacggtgcctcccagacgagcggcttgttacgctcctgcgcgtccctccgctggctggccgagccctccttgagggccggcggctcgtgaagctggaagacgtcgtcgccgtagattgactggagggcctcgagctcaagcgcgacagcgttcaagggctcctccgacgactcctggagaaaagtgaggaacgagctgaagtcggggaagctcggcggtggtgacatcggcgaggaggaggaagacgtggtcgccatcggagcgggccgcgggaggatgaggaggcggtcgagcttgcactggagacagttgacctgtctagcgtctaggagtttccgagcacgtccgatgggagctgtcgatgcgaagcctgtgaataggaaggaggaggtgtcgcgcttgccgtcggtcgtcgtcgtcgtcaggggcgaggacgaaggaagagcatgtccggacgtcccttcgttcctgcccgaccaccacctccttctgcatcctggacagcgggaccctttcgcagcacttgtagaatcgcgctctgcttagctagccgataccactcgtcgtcgatcagaagttctcaagtcaccaaccctcgcctccgcacctgccgcgtcggtcgcgtcgcctctccgccgctcagaccttgcaccatgccggccaagcgcaaggcctctgctgccgccacggctgcttcacctgcatcagcggcgacgagcgtcgcgaaccctccagtcaaaaaggctcgtgtcgccgccgagcctgctccagtcgttgcccctcctgcggtcggggcagtggctgcagcgccgccgccgccgccgcctccctcggttccgacagcacccgctcgccagcccgaggccggtccctcctcgcggccagtttcgaagcaaaagtcggccccagtctcagagcagcggcctaagaagcggaagctcgcacctccgaagccgccgggtgccggcctgcctgcgggcgcggccgtgacaggcccgaccggccagatcaaggggcgcgacgtcgtcttggtttcccgacgggccgagctcgggagctacatgcgaaagtgtaaggcgctcatggccgaggaagggtgcgtcgtcctccgcctgctgtgcttgcgcctgtgccaaatgtttcgggggcaggggctgaccatgtgtgccggccgtcgaccagccttcggtcgatcacgctgcacgccatgtcggcctcgattccgcacctcttcctcctcctgcattcgctgcttgcaatcctgcccttcccccggtcgacggtccatcacacgatcaagacctcgtccgtccgtctgacggacgagctcataccagacgacgaggaggaagcgatcacgctcggcgagcgctgggcctcggccgtcgaggtcgtcatcagcatcgtcggcgggccggacgaggccgtcactgaggctgggacgaggacgaagaagacgcggcgggcagggaagaagcgtggcaagggcaagggcgtcggggcggcggttgtggccctgccagcggtcgccgcggggacggcagcagcccctcccgtgccgacgacggtcgtccttgagtacgacgaggacgacgagatggcggcgatgaacggctgagggagaggctcctgtcaagatgcgaccgtcttgctctccagctgcgctcgcatctggcaaggctgactcgtggcccttgccgcttcagggctcggcatgcgatggatctttacctcccactgtgtccgatctggctcgcctcgcgcaggtctcgtgacgctcaatctgcttcagtccctagtcttgtccaacgcatactgtttctcgagagaggcgtttctgctcgggcaaaccgggcaaggagggcgcccgtacttttgattgctcctcgaggcggtgcttctcatctttgtcgccgaggaggcgcccgggtctcgatcccgctcgccgccggcaagcccgtcgtcgccgttggacccagggtgccaagttgcagccctgatgccttcccgtgctgttgggtcgcggcctacgagaggaggttttggtcagggtcaagcaggccgccgacgggcccaccgcctctgatgatgagacacctgccgaggtgagggaggaagggactttgatagcactgacgacggccgagcgagtgggttggccgatgcgctacttttcgaaggggcatcgacggcacgccgctcgcagccaaagttgccggcgctgcccctgcacggcccgtgggtgcggcggccaagacccgacccgtaaagcagggcccgtttagaggtgcgacctgctctgcgtgagacctactccatgttgcaagtcgagacctgcaccgatcctctgggccggcctgcaagggggggagaagtgggctgacccctttaatttgtttcgcgccaggtcggtgggcctttgtgcgagcgagacctctcggccaaagggggtcggcggcctggcccaaacctccaactctaaattccccgcccgcagcaaacgcctcgccccgctcgtctggtcgcagccagcagctctgccggccgggcgcgccgattttaaggtgcgaggttcccggcgaacggcacgccgagggaacgcaatctcgcacccgaacatcccatcgagtttcagccggccagcacctcagagacgaaccatcggcccgtcatcctgggcctcgcgacagtcaaaagggacgaccactgcgatcatggcagggtcttgcccttcttccccccattatcgccaacacgctcaacctcctgaactgctcgctcgaccggctctctcgcctcccttccgctcgttcaacacacgctcgctagcctcgcgcccctttccttctcagaccttcggcaacacgatggattcggcctgcttctcgagctacgagcagggcctgccggccctcgactactcgtccccggcctcctcgtcgtcctactcggccagcagcaccgagtggccatcgtacctcagcaccgactcgttcctcctcacacccggcgccggcgccgagagcaggcccgtcgacggcccgtcctacttcgacttcgtccccgtcaagcccgagtcggcgaccgctagcccttgggaggtctaccagcccgagcccctgcgcttcccgtcggcccacccgtcgtcgtcgcttctcctctcgccgacgtacgaggaggccgcctacccgctccagccctcgcccgctgccgcgctaaagtcgtcggcggctaagcctgtcgtcgagcggtccccggagccgatgctggccgaggacatcaaggatgtcgtctttgcccggcgccggccgacagccggcctcgctctggccaaccactcgcacgacgtcagcccgcgcaacaagcaggcttgcgtctactgccagtctggtcggcgcaaggtgagctttggcctgcctgctcgatgccctggtcccttttgctgacgcgatggtaatcctccgcctccagtgcgacggcaacaagaacaacctgacggcctgtaccgtctgtgcggtcgccggccgtgactgctgctggaccaaggtaagtcttgctgccgctttcactgctctaaagcttcgtaagctgacctaactgcctacgcccgccaggtcaagcgcctgcgaggcccgaaccgcgcccgcggcgacgacggcaagcccgccgtgccctcctcggtctaccgggtccgcacggccggcctcctcctcaggcggatcgaggagcagcagcgcctcgtccagcattcttcggcccctttcgcgatcgctgccatcatcagcgacaaggaagcttccgcgcctgtgccggaagaagaggacgacgtcctcggcgccgacggctgggagccctcgccagccgacggctttcaggtatccctcgacatcttctctggcccggcggcgcacgaatctcacgcctacccggcgacgccccggcagccgaccctggccctgccctcggtcctcggcctcccgtacggctacccggcccactgcaaccttcagccgtcaacgccgtacgacactttcgccggcgcgcaggaagccgacgtccgtgtccggctcgaccgctttgccttccctcggacgacgacggcccctctcaccccaccctcagcctcgcccctcccgttcgtctacgacggctcggccggcggccggccctcgctcaagcggtcccgcacggccgaggacgacggccgctggtcgcaccattcaccggcggccaagatgaatcgcgcactcgcgatcgacatcgccgaccagcggctgttctatgcgcccgcctacgacgtcgtcgtctactagcaggggcaggatcatttgaagatcccctcttcggcaggcatccatacccctccgtaattgattccctctcgcgtcccgcctcctgttgtgtccgagcccgggctcttcgttttttgtacacatgcaacctttgatttccaccagttgatttccaccaagtctgcgccgctgagggaaatggcggcgggaaaaataagcgacgacgtcgagagctgaaaaggggcgattgtcgtgttcccacgctggtcaatgcatttcggcggaactgcgttgcgtctcggcgggtttcgcctccgcccgaggacgcgtcgacctgtcgagggcgctgccgacgacgacggtcaagaccgccagccgcacagagatggaagccctgtcagtccaagaagggcggcatgcacgacgccgaagggaagctgaccgtcctctgcccctccgacctgcgcaggagaaaacagatcgagctcgacgcacggccgccatcccagccggcagcagcagcccggctgaagccgaagccggctgctgcaccctccgtctctgcagcaggcgccagcgcccgatcattcgactcgcccgctgcaagtgcgcgccgcgagcctccgaggggcaagagtgcggtcgtcatcgagctctcggacagcagtgacgacgacgcagggagcgacggagcaagcgatgaaccgccgcgttccgctcctccttctcgtccgaccgcgagcgcccgcttttcgaccgctagaacgagcgctgccggctcgaatccctgggccgcaccctcacgcttcttccagaagccgcctctgccggagcttgcctttatgccaaagccgaaaccggcgccgtcagcgcccgcgcctccttcagcgagcagcgggatccacgccccctttcgccctcagcgcttcatgacgccgccatcagggtcgccggaagttgacggaaggaaaggcacgtcgaccgccccgctctcggtcggctcgtcctcattagcctcgacctcctcatcggcgtcgacctcgcgcgcgtcgtcgcccgcttctatcgcctcctccgcggccggcccctccgtttctgccgtctctcgggcgctcaggaagacatctatctccagcgcaggaggcggaggaggaggaggaggcgagcgctctcattcctccttgacgccctcgaatccgtttgctgtccgccgcccactcgacgtcagccggccggccccgcgtccagcgttcctcccctcaaacctcgacttcggcccgtcctcctctggctcgaaaccgaaacctgtccgggacgattccgagcggttgtcgtcggcagcaggtggtggggaagagtttgacctctcgcgcctccggctcgaggcgggcgacatggaccgcgtgtcgccgaccgaggccgacgcccacatgcgcgagctcctcgaggcggccgtgtcgaatgagggggctgagggcgaggagtttgaggaaggtgaggacgtcgtcgagggtttccgggagggcattaggttgatgcctcaccaggtttgtctcgtgccctccctctcgtcccgtcaactcgcgctgactcctgtcggtcacgccgtcagattatcggcacgcgctggatgaagtcccgcgagtcaggccgccgcacgggcgggatcctcggcgacgacatgggcctcggtaagacggttcagtcgctcgcgcggatcgtcgcgggcccgccgaagaagagcgagctgagggcagggtggacgggcgggacgctgatcgtttgcccactgtgcgtaactgttccaaacatcctccttcagacggcattcggggcggcttgcaaagatactgacgcctcctccctccgtcctgcgccttttcctccccttcccttgacccatcgtcgcacgccacagagccgttatgtcgcagtggaagcacgagatagagagcaaaacaacgcgcgacctcctctcggtctgcgagcaccaaggcggagaccgaacgacgcgtgcgtctttcgctctcggcctgccacagagatcacgctgacacacactctgaacctctcctcctccttctctacctctcctcttcccatctgccaccatctcgtgcctgcatacgcctactcctcaaagtcaaagaggacctgctcgactacgatgtcgtcatcacgacgtacaacgtcgtccagcaggagcacggaaaccacctggccgctgccgctgccgccagctcctcatcggccagtggctctggaggccggaagaaacacgcagcgcgttcagactcggacactgatgactcggacagcgcctttggtgcctcactcgccagcagcagcaagaagaaggcagccaagaagcccggccggattttttccgctgccagtgccggcatgggcaagcgcgcgctctttgccgttcgctggcatcgcgtcatcctcgacgaggcgcagaacatcaagaaccgggcgagcaagacggctaaagcgtgcatcgcgctcgagagtaagtaccgctggtgcttgacgggcactccgatccaggtgcgtccccctcttctgccttccgccgcttctcctcgggcgcctgttctgtcattgctgcagctgaccccagtctttgccctcgctcaacagaacaacatcgaggagctttacccgctctttgcgttcctccgcatccggccgctgaatgattgggactatttcaagtcaaccatcgcgaaaccggtcaaagagggccggacaaaactcgcaatgaaaaagcttcaggtgcgcatctggctcgacgaagtgtctctgcctcgagagaaatctcacttctctccccttccccctttcagcttgtcctcggcagcatcatgctccgccggctaaagtcggccgaggtcaacggcaagaaaatcctgaacctgccggcgcggacggtgacggtcgtcaagtgcctctttgacggcgacgagcggaccttctaccaggcccttgccgaacggaccgcgctccgcatgtcaaagtttatgaaagccggaagcgtctcggccaactacacgtcgatcttgacgatgctgctccggctgcggcaggcgtgcgaccacccggagctcgtctcacagtcgtttgctgcggacccggacgcgatcgcccctgcgccgccgacaacgccagccggaacggccacggacgagagcggtgcggctgaggcggacgagctcgctgcgctcctcggcggactctcggttggctcccggccgacctgcaccgtctgctcggagccgcttccaactggatcgccggcgaccgtcgtcgtctgctcgacggcgtgcgccgatgtccaggcgatggcggagcgggccaaggccgaggtcgcaggcctgccgccgtcaagcgccaagacgcgcatgatcctcgacattctcgatcgggtccgcgtccagtcggtcggccaggagaagaccatcagtgcgtccgcctcccctctccaattcatggctgtcctccacgacccggccgactgactctgctactctctctggcgttgccttgcagtcttctcgcagttcactaagatgcttgacaagattgagcccttcctcaagcacgccggccacaagttcgtccgctacgacggctcgctccggaacgacgaccggacgcgcgtcctcgaccgctttcgggcaagcgagacgaccaatgtcatcctcatctcgttcaaggcgggcagcaccggcctcaacttaacggccgctaaccacgtcatcctcgtcgacctctggtggaacccggctctggagggtaaggccagactcgccccttatcgcacaatgcagggcccctcttgactgacgggctccctcccttccttgtctcccgccctcagagcaagcattcgaccgcgcgcaccggctcggccagactcgtgacgtcgagatatacaagctcgccattgacgagacggtcgaggacaagattctcgccctccaggagaagaagcgcgagctcgcggcggccgcgctggcgggcacgaagcttaacgttggcaagggcggtaatcgtctcggcgtcgacgagctcatgatgctcttcaaggttcgtcgttgctcgtccctggctggcgtctttgacggcaactgaccgagcccgccctcaatgtcgcagggcatcgtgtcgcatgatgatgacgacgattaaggtcggcctgcctgccctatcctttggccccctgacggctcgccgctcttctcgaaacgaactcatgaattcagcccggccggcgtcaccgccggcggcacgaccacctcgagaccgagcgcgagcgcgagaaaggcgagcttgtcgcgaccctcggtgatagtctggccgctcgtcttacccatgccatggcccgtgtcagtgtagacacgggcgagaatggggtgggcgttgtcggccttcttctctgcaataggtggagggcgcagggaaagaagcgtcagcgtcggagtgcaaaacagaacggtcggacgcgtgccgcacgttgcaaggtcgcagccagcttgagcgagtggccggggatgacgcgcgagtcgtgctcggccgtcgtcaggagagtcgccggatagtcgagcgacgtcgtcacgtctgcgaaggtcgattaagtgcgatcgtcagtcacggttgctggcaggctattgccgtcagagatcaaaagcgcgtgaacggactgtggaggggcgagatcttgcgcagcgccgcaaactcggcctcgatgtcaggtgagccgtactcggcctgccataagctacccatcgtgaaatgatggaagcgcaggaggtccatgacgccgacgctggagggcaggttttgggcgtggtcagactctgccgctgtcagcggaggcgacaagggacggactcgggcagggcggcatcgattagctcgggcacctgattgcagacggcgccgcagaggaggccgcctgtgacaagaaatagagacacagggagttagcgcgtgctcgtctttaatttgggcttggaggggctcaccattcgagctgccgtagatcgccagtttgcttgcgacaccctcgtccttgagccagcgagctgcgccgatgaagtcatcgtaggccgtctggcgcttgatcttggtcgccgcctcgtgccaagcgttgccgtattctgcgccacctctgatgcccgcaacggcaaggacgccctggaaggactgaagccaggtcgagaagagggcatcccaacggggctctatgccgagagagagagagagagagagagagagagagaggaaatacgagtcaggaggtagggcagcgactaagatgttggcgcgacgagcaagacttgagaggcgcaccttgcgtccaggcgaacccaccgtacccgaagagcagggttggatgcggtttggaaaggtcgagcgatctcaagtgtgcaatgtgcatcgggatgagagtcccatttttcgaggggtagaagacctggtgcgtcgagcgatggcgtgtcaggagtgaaggaacgggtgcagggcacgacaggacgaacctgcttctgaatgtagtttgcctccctccagccagcgacgctggccgtatgcagcacgctgaaggtcacgtcgccgtccttgacgactcccctgtagactgttggcggagcaatgtagctccagcctgcaggcgtaagagacgtgtcagcacgcgacagtcgccgtgcactcaatcgctgaaaacgcacactcgaccgagaactcggcggcatgcttgccgcgcctgacctccttgatcatcgcactccagggcagctcggcgtccgatacgcgacggatgggctcacccgagtctttgtacaaccagacctagtggagccgatgaaggatcggttagccgtgccagccggcgcccaacgacgcggcgagggcgcacctcgtgcccgacatcaatgctgtagacgagcagaagcaagccctggctgagcgctacaacttctctctggaggacggccttctcatgctctggaacaacgatctcccatcgcgtgggcttggtcatgtcggacaagtcggtcgagacgatgcacttgcgcgcggcaccgcgtcgcgacgagttgaagagcgatcggccggcggcggtcgtgcagatgtctgccgcatgtacaactacgtgtcagatgtgtgagagaccgagcaacgtgcacaacagagatcggtcgcacagtagtagctgccgtcccagtcctcgttgacgtctcggaacgacggatcggcccgcgaggcaagacctggcgcctcggtcgcgaggagacgcgtgacagggtcggttgagccaaagatgtcgaagaggagatgacggccgtcatctgtcacgcgcgggatcagaaccgagtgctgcgggttggccgggtcgctccagaggtaagtgtcttcagcctggttggtgcctagcctgtggatgaccgaggcaaagccgccctcggccgaagtgtcgtccttgtgcttgtgatccagtcgcttgtagatgaacgcctgggtgggaagcagaagagttgaatacaaagtgtcgttgaagcattctgacagatcggcgcacctcgtccccgagccactcgatcgtccagcaaaacttgacatcttgcaactcggcgtcgacttgcttaccagtcacgcaatcgacgatgtagaccgtctgccagtcgctcctgtagcgcgcagacggacgtcatcagcctctgcctcgtcgtcagccaagggaagagcgcgcgcaccctccgtgtgagatgagagtcgcccagaaccggccggacgggctccacttgccccagtcttcgctcgcactatcgccctccctgctaagcgagttgacgtcaaagaagacgtcgccctcttcgccggtaaaggtcgagaggtcgatcgcgtcggctgcgcactggcgccagaccggctgaggcagaccgttcgggttcgaccgccagaagtagcgctcgccggcgcggacaaagtcagagacgagcgggaaggtcgagtgctgctcgagcatctgctggagcgcggcactgtgggggaaggctgagaggtactcgtccgtgagctggacggaggccgcgaccgtcagcgcgagcgccatcatcagcatggcagcgtcaggccggcgctctcgtgacggcgacagggctcaccttgttttgagcgccgacgaactctttcgtctcctgagcaaaggcattctcgagatggctgccgagagaaagggtgccgagagaaagggtgccgagagaaagggtgtcgagctgtcagcctcgtgcagccgagccgttgagccagcggaggccagcgaccgaccggtagggatcctgcgaaagagccgtcgcttcttcagccgagctacatgtcacgagagagacatcaagatgaagccacctcgatctcgacaccgtgcagggcgtacgtcgtcccgtcgtgccgagcaggcggatagcgcagcttggtcgagctgctgcataagtgggggcaggcgcagcgcgttgtcagcaatcgtcagcgagcgttggccgagcggtcgcagcccgtctccctttcgagcatcgtcgtacgtcgccgccctagcaccggctcgccgaccgacgtcgcactcacgaggcggtggtcatcgctgttgccgggcgaacgacggagctttctcccggagtccagatgcgttcctgcggaatgtatgatgcacgaagccaggtcgtctccgccgccgcccgcgttttgcagcggcgcgagccgaaagtgacggcgaccagaagtcgcacctcctccgagcctgacaccgtctccttcctcccttctcccagcagtcttagaagcagcaagtttcgaaaagatggagcgcacgcccgtccagtcccagttcacgtcggccgcgagcacggtcgacgttgccgagcagaacatccaggtgcgttcaccgccagctcgctcgaccagggaccggagcctgcgccctctctcctccgtgccgccaaaggagctcgcacgacctggccagagcgccgcctctcagcgtcgcttggctcggcagacgagcacgctggttggtccgctcggctggcgtcgcctagcctggcgctcggagcagcgcaggacgctgcgcgttcggctcgagcttcctgctccggacaaggtgctgccccgagcgtccttgtccgtcggccggcgccgtcttgcggcgggggatggtcactgaggcatgactgggcatggttgacgagagtggaatacagtcctgaccgctgactgtactgcaccctcgactccgctctcctcggtcgtccgaccctacagatgtgcgtcaccgtctcccccgtgccgaccgccccttgcgctcgaggaggcagcctgtgcgctggaagctgacctctcttgcgttcgcttacgcgcttgcagctggaagatgcgcaagctcgtcaagcagctcgactcggctcgtggaaacggaacgtcgatgatttcgctcattatgaagcccggagtgcgtcgcagccaccactcgtactctggtgctcgacgcaacctgacccctgctttacctgactccgttcgtcggctcatagtcggccatctcggactacacgagcatgctcacgcacgagtatggtaccgcgtcgaacatcaagtcgcgcgtcaaccggctgtcggtcctctctgccatcacctcggcccaggcccggctcaagctgtactcgcggggtgcgtcgtcgggcgagagtctttcagtgctccagctctgcgtcctgatccacttacatcccctctcgtgacctgcctgccgcttgcagtgccgccaaacggtctcgtcatgtacgttggcacgatcctgacggacgaggggaaggagaagaaggtcaactttgactttgagccgcacaagccgatcaacacgacgctctaccggtgcgacaacaagtttcagacgggcgcgctgagcgagctgctcgactcggactcaaagtttggcttcatcatcatggacggaagcggcacggtgcgtcatcagtcggaccaggcaagtgaagtcgccccgcgctgacactcgctttgctcgctggccatcagctcttcggcaccctcagcggcaacacgcgccagattcttcacaagttttcagtcgacctgcccaagaagcacggccgtggtggacagtctgcgctccgtttctcgcgtctgcggatggaagcccggcacaactacgtccgcaaggtcgccgagcactcggtccagcacttcatcaccgacgacaaggtcaacgtccagggcatcgtcctcgccggttcggccgacttcaagactgagctcaacctgtccgacatgtttgacccgcggctcgtcgccaaggtcatttcggtcgtcgacgtctcttacggaggcgagaatggcttcaaccaggtgcgaccgtcgcggtggctgatgacgtcggcagcctgaatgctgaacgcgctctcgaccctcctgcaggccatcgagctcgcagccgactcgctctcgaacgtcaagtttgtccaggaaaagcgtctcatccagaagtactttgacgagattgcgctcgacaccggcaagtttgtctttggcatcgacgacacgctcaagggcctcgagatgggcgcggttgagacgctcatcgtctgggagaacctcgacgtcacccgatacgtcctccgtaacgctgccaacggtgcgtcgccgcaacttccccttccgacgcgagctccgctgatcttcctgcccaccctatagaggagattgtcatccacgctacgcccgagcaggccaaacttgaccgcagcaagtttatggacaagtcgaccgggctcgagatggagaacgcggttgagccccagcctctgctcgagtggtttgctgagaagtacaaggactttggcgccgcgctcgagtttgtcacgaaccgctcgcaggagggctcgcagttctgcaagggcttcggtggcatcggcggcctccttcggtgcgccgcagtcttcttgggtctacaagccaaccggaactgacctgctctcgcgactgcgccatcttgtttccagttacaaggtcgactttggcgttctcgagggcctcggttccgacgacgaggacgaatgtgcgtgaccgtgctggctcaaacctcgcaagccgcctactgacccgctgctgctcctctgtcgctccgccggccccagtctacgactctgaccactcgagcgatagcgacatctagagaagcgggcgtccctggctcatgttgtatccatatcctttgaagccttcctcgcttgaggccttgcgagcaagagccaacgcaggtgcgcgtcatcacagtcgctcagaaggggcgcgtggctcgtcagagtgacgctctctgttttctgcgcagttatgcgacgcgagttggagcagcatagacggaagagcagatgtacaaaagaagaggacggccaccctcatcgaggctcgtaaggcgggttgcttgtcttgatgtagctgagtgcggcgagaggcaaccagtcgtgtcagcgacttgagctccctttctgcagttaaggcgacgcacccgattccgccctgaacaatattgcccgcccgaagcttgatgctctgggatcttgaggtccgccggctgcgtgccgaccgaccaaagcgcgacagcgagagtgttcttgccgtccgtgttgagcaggccagggtgaagcgggaagctgtactgcggaccggccttcgagtgcagcttgccgacctgccatctgcgtagagtcatacggagtgcgtcaggccgagtgataaagacgatcgaccggcagggagacgcacccattgatgtagatttgagcgcgataggctccgcggtcgacgctaaagacgagagagatagggatgtcgaggtcgtgagggatcgccagctcgaacgtcgtcctgaaacacagctctggagcttagcggcgcgtccccttggtcaggtcgagcgggaccgcctcggcgcacctgaagaaggcgactgagggcaggtcaaggccgtcgcttggcgagcggtcaacccaattagagtcatcaaagccgggctgcagggcgaactgtcagcggggagaggcaagcggaaggtggtgagagacgcgcaccagatgccagccagcccgttctgcaaacagcccgccttcgttgttgagaccgcgtacggcatcaggcgggtcctcgccgccaagattgccctgcacgcgccctagcaagattggcgaatgaagcgtcagaagtcgacttggatgcgagggtagttaagggaatggcaggcgcacacgacgtaaagttgctgcccgacagcttgcaagccatgatgccgcgcggctttttgaaggcgtcattgccgttgtcgttgaggtagcccatgtggtctgcgcaagatggagacaagagggtcagcgagcgatgtcgagcgcgagacgtgcgccggcagctgagcttaccttgaaacaccgtcaggacattttcgccatgctgcctgagctcttgggctgggaaggcgaggtagagctggagctcgtcgtcgtcgctgctgagtgactggttggagccaaggtagcggccgttcagccaaaccgaagcggctccaccccagcccgaggctacgacgagctgaacgcccttgaccggcttcttcgagaaagagtcgaagcgaccgcgccagagtatgtggccattatggaagccatacgcgcctgggacctccgcaggcttggatcagcgtgcggtcaatctcgcggtcgtgtggatacgaggctgaccagcatgcaggacgacgccgtcggtggtcgatgcgttccagtatgggtcggtcgacgccgtcttgtcggccgctgcaaaagatgtgtcgtcaaacccagggagtgcttccggcagcgagtcgtgatacttccaccgggtgagcggcggcagctcgacaatgggcgggtcgaacgcgagcggcccctcgagccctccaaaggcgtttcggacgacacggacgggctgaccgttccacgacacgttgacgatgcgacgaggggcaaagacccaaagcatgacagccttgtcgaggtcgccctgaagcgcgagggtctcgtggtcgacgtagacggcggtccgtacgaggtgtggccctaaggaggcgtgccagtcagcaagcaggcctccatcccacgactctaattgcctacgcacctgccactaagacagtctcgttcgttccgacgccatagtacgacgcaaagggaccctcgccgtcgatcggaagctgaaagtaggtcgatgcgctgacgctgtcggcgagcagtattagccgttggcctgggagctcgaccgttgtcgtgtcagatcggtcggcgggaaggttggcccggaagacgagcccagcctgagcaagatggaaagatagagagcagaaaacgtctctcagcgagatccagaccgaagcttggcgggagagggcaccgcaccttgtcgctctcgcttgatgcaagcaagtcgactgatgccgggccttcgacgcggaggctgccggcagtctgcagcgagtcgacgccgagcagggaaaagtacaggtcgcgcatgcccttctgcccgtgaagaaggaggacgtcgacgccgtcgatggtcgtcgagaaggcgatcattcctgtcgtgaagaggacatgggtgtggccaaaggcgtggtcggcgtaggccatgcgtgcgtcgcgaccggcgagcgttatgttgccgaaagtcgtctcgcccttcgagtgggcgaccgtcagctggaaggactcgaccgccttcgaggttgactcggcatgtcggatgatgtagaagccggcgccggtactcggattgcgcagctcggtcgtaaagacgttgcggttggtaccactcgagttggtagcgacaatgtcggtcattgcaaagtcctgcggtccgggtcagtcagcagccgcaaagaaagcgacgtactaagccagcagactcacctgcgcggtgcggagaaaaaggttctgcagccggagttcggcaagcttgctgccagtctgccggccctcggagatgggcgctccatagtcgtacgaggtgtagactgaaggggtggcgaggtggccccagttggtgccgcctgcgagaggactacccgtcagcgagaagggccgccgcctctcgtgctagcgagcgactcaccgtagagcatgtagagcgaggtcatcttgacgttggcagcccagaggtgaccgacgtacgtgacgcgctcataggcagcatttgtcagctgagcgcacttgtcgtagccggcgcctccccagggatcgaatgccccggctccaaactctggcgagaatgacggccggttcggatccagctggagatggtcgttgccccagttctcctgcagttggtgccagttgtcgggtgctgaacagtcgaaaccttgaggataggcgtcaaagccccacaagtcgggcgcgccggggcctttgagataatttgagttgaagccgacgtcattgtgcctggttgataagtgacagcgtcagtatgtcgcgctgagccagtaggtcaggatggacgcacgtcagcggtacgacgacgcctgccttgcggaatgccgtcttgagctcctcgagatgcgcgactttggaccactgccacgtgcccttatcgccccgccgctggtcatccttgtcgagccgctggtagtactgagagcacgcgggcgtcacgccagtcagtctcgggggaacgtgtgagttagccgagggaaggcagcgcgacgcacctcgttctcaatctggactgcgattatcggcccgccctcggtcacctggttgcggcgtgctatctctgcaacctcggcgatgtactgcgaccacgcctcgcggtagtcggtagcattcgtccggagctcgccttcaataccaagggcccagtacgcaatgccgccggcagaagcctcggcctggatgtgcgggcccggccgcaggatgagccagagccccgactggcgacaaaagtcgatgaagggctggaggtcgcggtagccggtccaatcggtgacgccccgtttcgggttcacgagcgcccagttgacgtagattgagaccgtgttaaagctggccgccttgatcttctgggtcaagtcctgccagagcgccggcaccggcaaccgccacggatgaacctcgcctccggcgatgatcgcgcgctggcccttgatgaagagagaatagtctgcaaagggtaaagtctcgagatcagccttctgcatctaggccattcggaagccctcgaggacgcactgtcccactcgacgtcggtcgtcaggccgtcgctcgaccgcttcggcgggacgaagcccgtcgcgcgctctgagcggcccggcggccgcggccgatgcgtgatcgtgacatcgcgcgggcaggtcttgctcgtccggatccagctgagcggctgttgccagagcaggaggagaacgagagcaaggacgagaaggcggccgctcttggatggcggggttgagaaggcacgtcgagcggcgctcgagctctcgtggcggccaatctcgtcttccgcagcaggcctgcgatgggtcggtctctcgagcttcagcaaggcgccagccaaggcctggatctctaccaagcatgaggggcgcaccagctaaattcgaacgacctggaggccttctctgggtcgggtcggtcggctggtttgcccgtcatctcgtgtcgtctcgtcggctctggccgacaggagccggcaagggtttgagggtaaggctagggcaggcggggtctgtgggtcgcccgagtccctaggggaggtcgtttgcagtcctagtaagccaacgctggcgaggtcggagcacgagtgatgggtgcgatggtcgtcaagacgggcgggaagagtgatgctgcctccgaacgtaagccgaccctcccggcgcagcatgtgcatcgatcgccgaccgctctacagacatcctcgacagcgatgtgttcttcttcattcggtagacagcctgcaagaggctttgcaaggagggagcgcacagcgctgctgcagagcagatccggcaagaatgggccggccatcttcagatctcgaccaacggacgtctcaaagctcgtctcgcctccgcttgccccaggctgcctcgtcccgacgaccctccttgtcctgctcgcgccggcgctcaacaccggcaaagatgccgagcttctgcgccttggtcggctctgcgcgcttggtttcgatgactgggctcggcgccgacttgagcgtgatgggccgaggcgagggccggtagattgggtcccaagtcttgctctcaatgcgcttgccacggttgatgggcgtccgggacgcgagcgaggggtggtaccagatgccgccgtcatctgggcaggtggccttaatcgatggggcgtccgaaagcggcgcaaagccgggcgtgtaggccggcgggcttagcgtgagcggatacgtgatcgagacgagggactgcgtgtcgtcgcaatgaatctgaagagggactcggtgtcggcacagtatcggcagaaggacaaagctcggcgctgaggcacgaacctctgggttcgggtgcactccagctagagcggccttgatctcggtgagtgagtaggtgatctcctcagagggcgtgacctgtattccggcgaaggaagagggtggccaggttagcgtcgagcgggcgaggcgtcgggcgacttgtacagcactcacgtctgccgcctccagcagggacagcgtgtcgaacgtctgatgtatccggtgggccaaaaggaagtaggccgcggcctgcaacgcaacagagggatcattgtcagcatcacggaccattgtgttgttaagagagctgcagcgcgacgcacgtcggctccagccggcgatgagggcagcgagggaaagagcgcggcgagctgcgcggggtcgcatgtcggttggaaggtcgggatggaggtccctcctcggcgccactgcaagttagagacgatagcagagcaagggacaatcacgcgattagcactcagtgagcatcagggcaagagagcgatgtaggcgacgcaccgcccgctcgagcgtttcctcaaccccttcgccgacctcgcgctccctccattcgccctcgaggctctcgatcccaccctggccaagcgcgctgcagctcgtcaaagcgctgacgatgacatcgccctcgtgctcgcgtgcctggtcgcagcgtgtcggccgactactggccccgtcgcggccgagcaaggtgagcgagtcaatgtgccagctcgccgaagggtcggcctcccagccgtgggtgaaggcgacgcgctgaggcgacaagcactcggccgaggctcgaccgagcgaggatagggcgagagcgccaccgagtgcgaagagagctgggacaaccatgtcctggaagagccgagcgactgggagcaagcgagatggacgtttggagcgcgacctcttcggggcgagccgacgagaggtcggcgtgtcctcgcaacacccacctgccttcaacctcgccctccctacttcctcgtcctcgccagatctctcgacgacagacaaacatccttagcaagcagctcgaccgcatccgatatcacaccttctcacgcttgacccaagggctcagctcgccccgcaactctccaaccgcagctccaggaactctcctcccatggtgcgcaggcctgcccggcttccattgttcccttcgcaagcggctgatcgcatgcgtccagtctgtcacgctccacacgacgcacggcgacctcaagattgaggtcttctgcgaggccgtgccgaaagcggccgagaactttctcgccctctgcgcgtcgggttcctacgacggttgcctctggcaccggtgcgtcccggcctgttcagcaatgcctgctggaaggctcactgaagggcttgctctgctctcaatcccttcaggaacatcaagacgttcatggtgcagaccggcgacccaaccgggaccggcaagggcggccagtcgatatggaaccggccgttcgcggatgaggttcggtcgacgctgaaggtgcgaggcaagagccctccaggcacggcaaccagggcgcttcatcctactgacacgggtactgctccgctcctccagttcaactcgagaggcgtcgtcgcgatggccaactctggcatcgactcgaacaagtcacaggtcagttccgctctcctagccgctcgtcgagcaagcgctgactctctccttcctcacagttcttcattacgtatgcgaagcagccgtcgctcgacggcaagtacacaatctttggtcgcgtcatcgacggctccgactcgacgctggacgcgatggagcgcgagccggtcaacgcaaagagccgaccgctgcacgagatcaagctcgagagcgtcaccgtccacgccaacccggtccgtccgcccggtccgtagcttgctcattccgccccgactgacgttttatcctgtcccctcagctggcatcgcaagcactgtacaaatgatcctctccgtctccagaccctcgccatcgcgcgcgcaggtcatcagaatcccaaagttaagagcgcgagaggtatgagggcaggactacgccgacgagcgggcggcccatgtcctccggtcgagtttgagccagcggtcgcgaccggcgaggccgagcaggccggccggcttgccctcgctcgccgtcggccggaagccggcctgctcgaacgccggccggtactgtggccagccgacggcatcctctacgaggaccgtttcgactgaggaggccgagtcgaaagcatgcgcgagcgcgtgggcgagcatgtcggcaagcaagggcgaccgcacgtacggcaggtcgacgtagaggtgtcggatcgaggccgtgctcggcgctgtcgttggaggagcgatgccgaagcgggccaggttggacgcagtcgaagtcgccgtcgtcgttgtcgtaggcttgcggctcctggcggtctgcttctttgttgtcgcagcgtcggtcgccgttgtctcggcagtcgtcttgtcgtcggcggctgatgtttgagtgttggcttggcgctcggcccagcgccggtccttctccttctgcgagcgctcctcgggctcgatcaggctctcgagctcacgctgaggctggacgacgtcgacgccaacgagggcgacgatccggccctcgtactggtagacccagaagccgccggcggggtcgagggcgtagtactcgctcaggaaggcgacgtcgggcgccccgagggtcgcgcgcatccgccggctgaagggcccccggtgaagataggcggccgcggccatcagcggcatcgagcaagtaaaaaatgcctggcgtgaggcggggccagtcaggcggcacggtcagcggtcacagatgagagagcgtctggccgagcgcaagggattcacgcacgaggatcggcatcaggtacgaggccggcgtgtcgggcgtcggcgtccagccgacgagcttgatgaagccgagcgagacggcgatccagagtgtgaggacgagcgggtgcttgaagactggcggaacgaggtcaggcagccgtcagcaactggaagggcgtctagtcgacagcacagcagcaacgaggcggacctcgagcgttgatcgtaggcagttgctccatcacctgcgcgccgatcaggagctggactcgccgaaggtcggccgggacaaaggaacggaggccatctatggtgtcggacattcagtgacgggagaaggagaaagaaaggaggtcaagggaggagacgggtgggcgaggctgagaggaggggagagtagcaggatagtggccgttgagcaggaggctgcgaccggtcagccctgcggtccgactacggcagagtccggacaggcaacgaaggttccgggtcacacgaccacggtcgtgagctgccctccaggctggctcctcgcccttgcacgttggatggaagggtggccggtggcgttcctcggaggggtcgaagcgaaacgggttgctgcgcggccgtctgctcgcacgaccggctgaagccaagcccgccgagcccctcctctctccttttcgcctgacgtcgatgttcgaccagctcggtaacggcgtatacctctctgccttagcgtagcctctcgagctgacccgctgacaggcgagagagaaggcacgacgacgagagcgctgacacggccagcagctgcgaacgaacgtgcacgtcggcctcctggccaaatcgggacgcagcgcagacagacccgccgccggcagaggcctcgaacctctcctccgccggcggcacacgccccgctgcgagtctgccagcagcggcatcggcttctgacgcctgcagggcgctggcccttctgctggccccagcgcgcgacctgaacgtggacgctattcatagctcttccttccggttcgacccttgccttgcacggtcggtccctcgcgctgatggaggcggcggatactgactttgaggctgcaggcctcttaagggagggtcaggcgagaggctgtcggtctcctcttgtcgtttgtctgctcagcccgccttctcctcgccctttcccctccccccctctcctcacccaggtcacagccgctgaagcccagccatgtccgacatttccgaggccccgcttccggacaagttcgccaagctccagtctgacggcatggtcagtccctgcgctccagcagctctccagcttttgtgctcgtcggctgaccgtccccgtctttgcttcccaggacgagcgccgccgggccgccctgcgcgagatcgacgacgccaaattctcattcttccacgtcaaggcctgcctcgtcgccggcgtcggcttcctgacagacgcctacgacatctttgcgatcaacatcgccgccggcatgatcggcaaggtctacggcgccggcggcgccctgacggcaaaccaggacctcggcctcaaagtcgccaccccggtcggcacattcgttggacagttgctgttcgggtggctagccgatgtgatcggccgcaagcgcatgtacggtgtgagtgtcgacgaaggggcgtggcagcgctaaacgcgcgggtgaactcgcattgacaagctgcgctgcacttttgacccccttctcgaaacccaggtcgagctcatgatcatcatcatcgccacgctcgcccaggctctctctggtcatggcccggcagtctcgatcatcggcgtcctcgtcttctggcggtcagtctgcttgtctggctgctgcgcgccgaatcccgccggctgaccttgctctctgcaggttcatcatgggcgtcggtgtcggcggcgactacccgctctcggcaatcatcacctccgagtttgctgctactcggatccgcggccggatgatggcctgcgtcttctcggctcagggctacggccagttcctcgccgcccttattggcttcatctcggttatggcccttaagagcgacatcatcaatggcccgacgacatacgacaaggtcgacttggcctggcgcatcctgatcgggctcggtgccgtcccgggtgcaatcgcgctctacttcaggtgcgcaccggacacctttccctccacccttatccactcatttgctgactttgttctattgcatctcattaggttgaccatcagtgagacgccccgctacaccctcgacgttgagcgcaacgtcgctggcgccgctgcgtgagcactctacaatttcccttcaccatgccttccttctactgaacccggctgctctcctgccctttcagcgacattgccgccgtcgttaacaccggccacttcaacacctcgcgcgaggacgaggtcgtccacaaggtcgacgccccgaaggcctcgtgggccgacttctggcgctacaacggccagtggaagaatggcaagattctctttgcgacctcgtactgctggtttgcgctcggtgcgtcgggcagaagactctcctgtccgctctcggcgctcgactgacccttaccgctcttctttctttacacagacgtcgccttctacggcctcggcctcaactcgtcgacggtcctcaaggctgccggctacggcggcgtctcgccggccaatgcgaccgcccagttcaagacgtggaagacgctgcatgacacctgcgtcggcaacatgatcctcgcggccggcggcctcattcctggcttctggttcaggtacgtttagatcccgtccactcgcggcctcaaagtgtttgctgacctgtcaccgcctctgcttcagcatcgccctcattgacggccggctcggccgcaagggcatccagctcctcggcttcttcatgctcaccgccatcttctgcgtcatgggcttcggccggaatgccatcctgggagccgagaacggcgcaaagggcttccttgtcctctactgctttgccgtgagtgactcgcctcgccgaaatcctttgcccagcccactcaactgaccactcgctctcattcagaacttcttccaaaactttggccccaacacgacgacgtttatcatccccggcgaagttttcccgacccgctaccgctcgacttcgcacggcatcagcgccgcctcgggcaagctcggcgccatcgtcgcccaggtcggcttttcacgcctcaaggacatcggcggcaagcccggctccaaccactgggtcccgcacatcctcgagattttcgccttcttcatgctcaccggcttcctcgcgacgttcctcctccctgagacgaatggccggacgctcgaggacctctcgaacgaggagcaggacgactttatcaagggctcgtcgtcctcggctgactcgcacaagtccatcgccgcctagtccgttcttgcctcttccacccgctgctcgcttgtactctcgcataatctagactcttccatcgcaaaatccttctttctctccccgggcttcgttccttccttcagccgcatcacccagaaactgcctcgtcctaatgcacgtgacgctccgccgcatcctcagcccttctagccaagcacgagaaggggaaacgagaacaagggcccggagcattgaccgctcgcaggcccggcccggccgtcttcagctttgggcgaccgattccacccacaagctacctctcgccattggccttaacacagatctccttcttctccagctgctcgtttcagcgccggggcaatcgtgagggttgtcattagtatctcttcgaccacgccgcccttcgtggaggagcaagtcgccgagtgagtaagaggagggttgctggtaaccaggtcgcgtcgcccttctacgtcgtcgacgggccgacggcgagtcgccggaggtgctcctacaagagcagaatggaaagttgaggtcagtcgcgagcgcagaaggcagagacggagtgggatgggaagccggtcgcaccatgaagacctggaggctgacgtcgtctgtgaagatggcctggccggcgcccgtgccggcgccgtacgagccgccgctcatgtgggtcgtgctcgggttgagcttggagaggaggaagcgcgcctgggagccgccctggtcgcatgagatgtagcgcgggattgggttgcggtcggcgagcaggtcctgcgacagggggaaaacgaggaggagttagccagaaggaatacggcagagcagtaggagcgcgcgcgccagggattcgccgcacctgcgcgtcagcgatcggcgcctcgagcagctccttgaagttctcgtagccctcctgctcgtggtagccagccttgcgccactgggcgaccgtctcgccgtggaacagcaggatgtgaaagaaggtgtcgagcaggaggatgacgtcgggcttgatcgagaccgagtcgagcagaacaggttggggcgcaacgtcaaacgtgtacgacatgagcgtcggctgaatcatgatgagcgagttgttgacgtcctcggcgttcagaatatgcctaggaagcagggtggacgagggtgtcagcatctggagcgcaagcgcagcgacgaggaaagggggtcggccggaccggtagtaggccgtctcgtcaggcgagttgttaaacacctggagaaactgactccgccggaggtggaacatgaactgggggtagattgagaaattgggcgcgagccggaagctcgtctggtcctccttgcgatagtcggcaaacttctggcagagtcggataagcatccggtcgagccagcggaggacgtcgggcgagtcgtcaatctcggccttgaagacggcgatccgcgacatgaggacggcggccgcctcctggtcaaactgggcggcgatcgtcggcgcgccgccttcggcaaagttgcgcgcgaccgtcgtcacccggagccggtagacgcccgacgggtgctggtagtgcgtgacaaactggaccgagccccggccggcgacggcgggctggccggcgggcgtgacgacctcaaagtagacggcgagcgccgtcttgtcggtcagcgagcagaccttccaggccgacgtctggccaatgccaatctcggtctcgccgacgcaggggcccttcttattggccgagatgacgtggccgatgacgcccgaaatcttgagctccttggtggtctgccaaggggggtgaggacaaagagggtcagagccctgcaacagagccagcaagcgagcgaaggaaggcggacctgaacgtcaaacgtcgcgttgaagcccatcttgagcgcgccgtccggtccgggctggagcgtccggaggaagctctgcttgaagatggccatcgcaaacgagtctgcgaggcacatgacgccgttggtcgcgttggcgagcgacttcatctcgagcaggccgacctggtcgaggcagccggcgtagatgtcgacggcgtgtccgttcgtcgacacgcgcttcgcgagcccatcgtagaactgggggcgcaagggggaggttgggtcagcactcgaccagcgtcacccgtgacccgacagagagcgcaccttgagcgccttcttgtagtgcttgaccgtgtcgcgctcaatgtcgtggtgcgagcggatcggctccttgagctcgggcccaacgaccatccccgggccctcggtcgccggcccgccggcaaagagcatgatgcgcgcgcccgtgttggggaaggtcgactgcgcgaggagcgaagcggatcagcgagcagaagaggcggtggaatggaccgtgtggggagggacgcacctcgagcaggccgacggcgacgctgagggccccgcccgtgcaccggagcggtcgccggtcatttgcgactggccacgggtcgcgctcgagcccctcgaggatggccgtcagctggaactcgcactgcccgacgggcatcaggaagcggctcgcgccaaacgccggctgctgctgctgctgggcgggctggccgggcgccgaggggcgcgggacgaccggccgggccgacgggttgaggccgagcatgtcggtcatctgcttcgggctgtactccttgccgccgcggaagacgtagcttttcgggcaagccgtgtagccgagctcgtggacagcggccatcgtcccgaacgtgacgagtccgacgagggcgttggccgggaggagcgagagcgagaccacgagagtctccttcagggcggcgaggtcctcgggctcaaggcacgtgtcgacgacgtagaggaacacgggcgggacctgagccggccgggcgagtgtgtactcaatcgtcgagtactttggcaggagctccggcggcaggttcgtcggcgagatgtccttgtagtgcggcgggaaggcgttgcgcgagaggcagaacgggcagatccagagcttggcccgcatgtcgagctgactgcagggccggtgtagaaaggaggcggggcgtcagctctctctcgagagtttgacgagcctcctacgagctgcatcttactgctcatgctcctcgttcggggacgaaccagtatgggttgaggatcgcccggcacggcggcttgcacgtcacgggctcataaaggaccggtgggaggtcttcgcgcggcttgagaggcgagtagagggccgagatcggaacgaccgtccgggtggcctcgatccgggacgacggccaggtgttccacgagaagcggacgcctgagggcggaggcagggtaaggggtgcaggtctcagcgagagcgcgttcgagtgtgtgcgagctcgagaaaagcgcgggagctgccgtcctctggcaaggagactagggactgaccatctttctcctcctgctcatcaaagtccatgctgggcgcgagtaggggtgtaagggtggttggggcagggtgaggctaagtgctcggacgcggaggagagagatggatgagccagcgcagcgcgcgttcgaggagcccttagacggcagcgagggtgtgatagatgaatgcgccgccaaaccggcttttcagctggccatttgccccttttcgttcagccaccgtctcagcccacctctccgcggctgagccttcgcgccggcactcaagcagccggcctgctctcgtctcctcttctgctggcgtctttcgctctcgcaacagcgacctcgtcctgacgcaaaattagccgcctgctcgaccgctggaaggtgcctttccctaccgaccggccagccctcgccttcccttccttcctcaccacgctctcgcccttgtccctcccgatctcgccttcagctccctcgtcgtctcgcctcccctctcaccagtccacccagccacccagccagatgcccaacgcctgctggcgcaaatcgcgctcgccctacgcaccctcgttcgacgcccgaggccggccgtgcgagctcgtcggcaccgtccagaggcttgaagccttcgtcatctttggcttgcgtgcgtcccctcactctgccgctcagcttatgcttctcacctctcagactcggcccgtgtctcaatctgcgggcgcgtccgatattcggtgaagctgcttgaatgcaacctgccggcgcttggccaagcgtgactagagctcaatagacaagaccccctctcgtgggccggcaacctgctctcttccttatcggaagctgaccaacgctgctccctctctttcggagcagttttcctcgtcctcgttggcctcgccctcggctgggtcatccgttactcacgaaaggcgtgcgtccctttctctacccttccctttcatccccctttcacgtgtcccccgtccacgcacgcctgacgcgccctcccttcctctgtcgactccagggcccgcttccgtgccttctggaaccaacctgcgccaaaccaagcgacgcaccaccggctcccctcgaccctctcgctctccccgcccgagtcgcacgagctccagcagccgggcatgccagctttgccgtacgtcgaccgcgggccgtacggccgacgggcaccgtcgtcgagccgttcgagcggtacgagcgtcgagtcgctctcgctcgcttcgaacgctggcggaggcacgaaggagccgaagtatgctgtcccgcgatcgacctcgaggcctctctcgacgatggcgctcgacaacggccttagccccggtggccccggcggcggtctcggctcgagaaagtcgtcgtacggcagcttgaccggcgcaagctcgccactcgcttcgtcctcggcttccatctcaaacggcaacggcggcggcggcggcaggcctccgcttgggccctcccgaatgagcagctcggtcctttccgctggccaccacggccgttcgccgttgtcgagcgaggtcgacgagcgtggtgtctttgtcgcgtctgcccatggtgtgggcgaggaagggcgtccgcggccggtcgagccgtcgtatggctctggagggctcgacagcccgccgttccgggagtaccgtccgtctctcctcttcgttttccgcatccgtccctcctttgactgactttcatcgttggacggcctcccttcaccttcccattcctttgactctggctcaattgccgctgccatcacccgtaccccgttcccttgcccggccattaacagacccttcctcgcccggcccgacaatcttcccctacccttcctccgcctacccgccctaccgtcccccgccccccaacgcgtcaatcgagcccgcctccatctcgcccctcgaacggctcgccttcagcccggcctcgccaccccatccccgtggagcgagcgcgagcgcgtacggcagcccgccggcgagcccgggccggggggttcgcgggcccaactttagtcggccgacgagtagggcaagcgggctcggcagtagcgagggagccggcggtcgccaggcgtagaacctttccgtatcccaggcgaaggccaggagcgcgctctgtgacgggccaacctagccgcaacagcgctcaccctctctccccctcctttcatctctcacgcctctttctctgtttctctgctccctccctcacactctctttccctttctctgtctcttccacggagtggaccttttctcttttctacccttcattccaagaaagccctacatcccacgctcactcctgccgcattcggagagaggagggggctgcggtaggttgcctgcggggtggagaaagctgttgaggcgggatggcggtcgagagggacgagacgacgtccttcagccccagcagcaaaagcccgtcagcaggccggtttggcgtcgccgaccttctcgcttcagccaagcactcgtcttttcggctgcgcgccccggccacgctgctcgagcccctttgacgacggcccagcccctttaacgagcgcgccgatcgcgtcgcgcagatcggtctttcgacgaggtccgtccgcggctcacaccgccgagcgacgactgccatcgagggcaagagaccgtgggtccgaagaaagattcgcattaagatgaggggcaagagatcgaagggagggccgggccgggcgaaagaagagagttgggagaggacatgatttcagcgagagaggggggccgtgtgcacgagcagtcgcaggggctcgatgccggcctcgggacttcagtactcatttgaccggccgacggcgccaacccaggtccagacgcgccagacctcgccctggacctcggcctcagacgtccggacgttggcgttcttctcgaccgccttctcgacgccggcccagaggcgcgcgcgcgccgccggcgaggtctcggccgcgaggatcacatcacgcagatgcgccggtgcgatatgcggctcgggcgcctgaacggggtcgatgtagtgcagcttggcctagaaagcaaagacgcaaggttagtgcgtgcagatgatggacgccctcaaggagcaagacgtacctggtcctgcagccgggagaggacgctctggacgatctctttgacgcgccggttgtcctcggtcttctgtttgatctgcgagcggaggtaggcgatcatggcgagagtgccggcgacgcctgaggaagagcgcgggagcgtcagactctgcatgaagccctcggtagcagcaataacgcacctccgagctcctttttccaggcatgcagacggtccttggcggcaagcttgcctcggcaggagaggttcattgccgtccgtgcaccagcgagccaacgctcgccactacggggagagtcaggcgtcagccgacaagtcagaaaggagggaccttcagcgctgcgacgcacagctcgttgtggccggcgatgatgtctccgtgagcgagcaggtcggcgatcgcgtcgtcaaagatgccgaggaactcctcctcggtgaaggagggctgcgaagatcggagaaagggctaatcagcgtagcaattgagccgcaagctggaggaaggacgcacgtctcggcgctgcataaacgccgccttgatctcatcctcattgacaccaaactcggtctcgcggccggcgtccgcaccatggcgacctccgacatggcaaagccagtcgccgcgctcggtcgcgagggcgctctcgagcgtccgggcgagaccgccgacgagccggagcttctcggtgtcgggcacgcaggccggtgggaaggcgaccgagccgagaacggggaagccgttgagcgcatcggcgacggcgggcgcgatcgaccggacgaaaggcatcgcctggatgtactccttctcgcagccaatcaggtcgccgctgaagcagctcgcgtgcgccgggcagggcgtgcacgcctcgggcttcgggaggaagggaacgagcggcaaggccgaggcgtcgcagccggcctcgccaccaagctcctcgccgttcgcgtgccgggcggcacattcgcgggccgaggcgatggcggcgcgctgggtgagcaggcggacgttggtgtccgagagcgagtcacagaagccgatctggcgcgactgctgagtccaattggcgaggaagagggcgagcaggaggagggcagtcgacaaggtcggtacaatcgtcttgcgcgagacgaggtccgacggagaggccggaacgagcgccgtcgggtgaatcggggcggatactgcccgagcctgtcttgcaagcgcctttgcgctctcgactggcgtcgacagagccgccgggacgatctcctgcagcttttgtgagataaccttgttcttggcctcaaactcgtcggttgaggccgtgccgtgcggttcgtcaaagtcgtgtagctgctccggctgcgagtccatcacgacaacgtcctcgtcctctgacgagtcgcggtcgtcgccaacaacggtcgccgcatcgccgtcttctccggccgagtgggcgtgagcctcgacccactcgcggggcgggtgccgcaagctctcggccgaaggcgcgatgcggtccgagagcaggttggccggcagcgacttgcgaccggcgccgatcttgcgaggcgcaggggcggccggcgagggtgggtccggcgacgagtccggaactgccctcggcggaagctcagactggcgccgcttcgtggccgacacgccgagcgatgacttgcgccggatcttgcgctccctcgcctcctcgccaccgctctggaacgggttgtaatcagagaagcctgactcctcctccttgggcgggagctcgaccttgatgctcgtgccgcggtccttgcgctcctcagagctgacgacgacgggcaccttaaccgtcggcgtcgtcgcaacctcggcagcaggcgcaggcgggagatcttgctcttgctcaggctcgctctcctccgccacagtgatgttggcccggctctgacgacccgatctgcgagccgccgacggcgccttgagagctgcgggtacaggaggcagaggctctgacgcgctcgggccgggagtaatcgaagatcgacgagtcgtgcgcttcttcggcagctgcaagggagactggtcagcaagctcgtcgtcagatggacaatcgtcaggcgggcgcgacgtaccggctcggtagatttgtcctcctcctggtcgccctgggcagcaatctcctcggcctcgaactcgggttcggggacagcaagcgacttgcggctgcggctcttgcgcggggcggccttcttgggctcgggaggaggaggctgcggacacgagcgccagggtagcaagcgagggagcgtcagagtgagctctcatccagtgagggagaccaacatacagagctctcggaccgggcgctttccgagtcagcgatgctctctgagtcggcaacgcttggcgtcgggacgaggacgatgccccggccgctcgccttggtcgacttgagcgagttcttgagcagcttggcccgctgcgcgtagacgccgtcgagaaaggcggcgatcaggtcggcttttttagcattcgaagcgtacgggatgctgtgctcgagcaggaccgatctggatgggtcaagggcgacgacgggaggtggtcgagagggcacaagtcagtcgtgcgttggcaggaacgggaccctcggccggtggggatcgtcccgggtctcgagcgggcgggaagcgcgagggccaggccgacgcaccggagctgagcaaccttgagcgaccaggcatcgaagtcttcggccaggtaggtggatgcttcgggggccgacatgctggaggcgaggcgttttgtgcttgatggctccttgcggcttgacggttgagtgaacgtcgagaggagcggaaggtcaacgcgcgagcccgcgcgtcgaagttggttgctttccttcgcaggcgctcggcaggcaggcggaggcgggcgggcaggctctccatcctcaatgaagagtcttcttccctattgtcgacgctcgtcatcagcagaggtgctgaatgctcgttagtatgctgccctttttaccagggctagaggttcagaaggtgtgccgaaagaaggccggggcagctacctcactggcggcgccgctgccgagccgccctccctcgacgtcggcacgggactcgagctcgccgccagagtcgcctcgaagcctgcctccaccatctctcgtccatcccagccaagttagaacctcagccagcgcagattacgatgccggagagcctctacgacgaggccacggcccagatctcgagcttcgtgcacgagttcaaccagatccagtcgtcgtttcggaccgagctctcgcatgcgacgcacgagatcagtgcgtctcacgccctcttcctccctcctctcgagttgagccatcatcaacactgactgctgacctctcggtcttgctgtactgccccaccgtagacgagctcgttcagatctacctcccatcaatcattcccggtgtcgccgcacccgcgccgcctccaccgcctgcgccgcttgcgaccgtcgtcgccgaccggtcttcggccttcattcgccgaaacgcctatctgtttgccggctcggccctagccgtcaccgccgtcggcgtcggctacgtcggtcttggcccaagcggcaggcgtcggctgtggagccaggtgtcgggagtgggcgagcgcggtgtccaagcttgccgggatgtcggagagctgaagcgggccctcgagcgcccgtttaaccgggacggcaaccggatggaggtcatcggtgcgtcgagaccaagcgttactatcaggactcgccgtttgttcgtcagagctgaccctccctgcagtcctgctcggcgcggacgctacgccgctcggctaccctctcgcacgctttctgtgcgtggtcaccacgttcaccgcagagagatagttgtgctttcggtactgatcgtgcacatcaaccctccacgacacagcgagtcgtcgggctacattgtcatcgcctcggtctcgaccacggcagcggccaaggcgctcgagaagagcgcgaacggcttcatccgcgccctcgttatggacccggagagcgtgcgcagccgtctacgtctacagtcgaccgtatgccgcccttgctcaccgccggttttgactgcgttgctttgcaggccgactcgatcgagccctttgtcgcggccaccaagagcgtcctcaccatgcgcttcccgatcaacagccccggcgacccttatgcgactgcggccacgacaccgcagatcacgtccatcgtctcgctcgcctcgcttccggttaccaccgccggctcctcgacggcctcgctctcgctccaggcgcccctccacacgccactggccgtcatcaccgctctcttgccgcaactgaaggcgcctctgccagcgacattggctccggccgccctgcgcgcttcggcgagcgacaccaagcggcgggcgtttctgacacgtgcggtcgaaaagaaggtcgtcgtcctcgtacccgtccagggcaacctcggatcggccgcgccgggcctcgccggcctcgaggtcgccaacgctgcagtgcgctcggccgttcggagcctcgccgccgaggtcagcgccgcaacgacgaccgacacctcgcgcatcaaggtcaatgtcatggaggtcggcttcatctcgaccgagcggacggtccggccgacggagctcgttccccggctctacgcgctcgccaacgactgggccagatggtggatgtcgtgggtacgcggccggcggcagccaagcggtttcgaggttctcgagcgctccgtcggccggtgcgtcggtgtaggcggacgctgggcgccgcgcttctcgctcctaccatcgcgcgtcggagtctggcgggtcggcgctggctgtgagtgacttctccaagtcggctacgcttaaggctggaccctaatcccgtcattcttctctaccgcgtagcgtggacatactcgattctgcctgccattcttccctcccagctttttgccgctctcatctccctccagcgccgggccggtctcctctccttgccgctccctccgaccccgccggcaaagccacagccgcagcagtcagaagcttcacatgcagcaggccgggctgccgctctgcgcgctcaggcggcggcggccgctccttcaccagcgccagcgccggctgcgccggcatcgaaagttcgatcggtccagctcgagtcggacgaggagatgagcaccgacaccgacgacggcagcgggcttgcgtcgtcgggcatgggcagcctgggcgactcgtgggtccacgagggcttgaacgagacagccgcttgaatggtccgcccaagcccctcgcgacgctgcccggtcgcctgtacgatctgcacgaccttccccttcggctcctacttcccgtcgctccgctctgcaccactgtctccgtcgatgatctgcctttttcgagttcttggatataatccttgcccctgtttctgagcagcagcggtcagagggtcggagccaaatcccccgcgcgagtgaggatttagactcgctgcgcgggcctcgccgccgcccgcaccaggttcgacgctcgcagcgtgtcgccctgctgccctccaacccacccatacctcctcctccttcaacatggcgtccgtccctactccggctccaatgtcgctggaagacggcctgtcgaagctccggccgctggtgtcatccaagctgtctcaccagaagaagccggcgctcctgctcaaggcgctcgagtcttcgctccctcagcccattacgccgaccgcctactacgctgccctcgtccagacgatccagcaggcagtcgccaaggaggtcaaggccggcgagctcggcgtcggcgagggcgacctcatcccggccgtcctctacctgctcgcgatcgtcgtcgagttcgtcccggcggccgtcctccacgcccagtcggaaatgggcctgctcggccccgtcttccagacggtcgacacctcgggcggcctcctcggcgccgacgacagcgcggccggccaggccaagtcgctcgtctcgctcttctcgccctgcgcgacctcggcgccctcgctccggtcgctcatcgccatcgtccggcagctgctgctctcggcgcccacgccggccttcccgacctcgccgtacgtcgcggcgctcaacaccctcctttccctcacgctcgacccccggccccgtgttcgcaaggtcgcacaagaggccatccgcgacatcctcgcctcgcctccgccgccggcggtccggcacccgtacgccgagcgcgtcgccaagagcctcatcaagattctgagcgagcgcatgaactctgaggacgccgtgcagcgccgcatctgggccgtcggcttcgtccggatcgtcgccagctcatggcccagcgacgtaagttccggtagtctgtcgcgaaacggtgaccgggtccagtgctgacgaactcccgacgccgcccccctttcatgcgcagcaaatcacgccgcttctcgccgtccttctgccgcttccctcgcaccccttccttcagagcacgactctttcgctcctctcgcacctcctgtcaaagtcgacgtcgacccactcgctcgagtcgcacaagattccggtcctgctgtccgagatcctctcgacgcctccaaaggaccagtcggtcttgccgtcgtggctcgaggttgtcgagaacggcatgatttcgtgggcgcacgacgacccggccggcgccgagaaggagtttggacgcgtctggggcatcgtttgggcgcacctcgagagtgtcgagggccgcgagaagggtgtcggcaaggcggctgagaaggcgctggccggtatggtccgctactgcatcaccgagggcatggtcctcgccgccgtcgccgaggtctccaaggccggctcgtcattgtcgactccgctgccgactggcaagaagaataagaagcagatccatcagcaaaccaagccggcggcggatgcgccgatccttacccagatcgtcgccaccctccagatggcgctccacgtcctgcgtgccatcccttacctgtcgtcgacgctcacgctcgtcagcgccctgctgtcgcggctccgggttcgcattccctcggcctcttccagctcgacgtacgacccgagggcgccaaccgcggcccagctactcctgctcggatgcgtcgccgacgtcggcgagctccgcatccagaagggtttcgagcttcgtgagcgggccgatgaggtcctcggcatggccatcgaggtcattggccccgagggcgtcctctcaaccctcccgctcaacgttgagcctgaccgtgatacgtcgctcccgggccgggcattcctgctcccgatcctccgggccaagacgaccaatacgacgctcgcgtacttcaccaacgtctttgtcccgctgagcgagcggctcttcaacgccaagacgattgccgagcgctcgcggccgattgagggcaaggtctacgaggctctcgtcgaccaggtctgggcgtgcctgaagggcttctgcgacctcccggtcgacctgccgaaggtcagtgacccatcttctggccggtccccgcgaggaaattacctgcgctgacaaccgcacgcccgatcgtcgtcttcaggccttcacgaatgagttcgctgccctcatcacccaggttctttacacccagccctcgctccggccgacgcttctgcggtcgctccagactctcgtcgagacgtcgctcacgctttcgcggtcggcagcgccaccggcggagctgctcgcctcgttcggtgtcgaccagacgaacggcaaggccaacctcgctttcctcggcggcatgacgagcaacctgcttgccgttctcttcaacgtcttctctcaggttgcgcgggagcagcgcggcatggtcggcgaggtcatcacgtcgtacctcgccgtctcgagcgaagccgatgtcacggccacgtacgagaaggtcgtcggccaccttggcgaggcccttcagctgccgacgccgaagcctgcgccgggagctgctgccgtctcgccgacgtcgcacacgatgctcgacttgctcgtcatcgtcgtctccttcctcccggcgccggccgctcgcgcgctctttgcgcacgcctcggccgccgaggccaagctcatcggcagcagtgacccggccgtccagaagaagagctaccgaatcctcgcacgtctcctcgagacgggtaaggtgacgcttgctggcgccgagctcgagaagtttgtcgctcggctccgcgacggcaccgaggtcgtgtccgccggtgctcgccgcgtgagccgcctttgcttcgcctacggcctcgaatcatcactgatatcctgcccatccttcgcgtcgacaggaccgcatcctgctccttgccgagattgtcccgagcatcccctcgggtcagctccacctgatcgccgacctgacgcctgaggccgtcctcggcaccaaggaggtcaacgagaagacgcgtgacgccgctttcgagctcattgtcctcatgggccagaagatggccgccggcggtgtcatcaagcgctcgcaggtcgagggcatcgacgccgactcagagatgcttgacgagggtgagtcgcgttcctgtgttcaatcagcaacgaacaccagggcgctgactctacccgcttacccctctttcagtcgccgctacgatccccgagtacatgacgatgattgccgccggtctcgcgggcacgacgccgcacatgatatcggcgacgatcacggccatctcgcggctcgtgttcgagtacaaggacgagattccggctgccatgaagtcggacctggttgcgaccctgctcgtcttcctctcgtccaacaaccgcgagatcgtcaagtcggcgctcggctttgtcaaggtcatcgttgtctcgttcccggcgctcgagattcagccgcacctcggctcgctcgtccctggcctgctcaattggtcgcacgaccacaagaaccacttcaagggcaaggtccgccacatctttgagcgcctcatccgcaaggtctcgtacgacgacgtcaagcttgcggccgaggaggctgccgccgcagccgaggacgcgccgacgcagggcacgcccgacggcgtcaagttccttgagaacattcgcaagcgcaaggagcggtcgaagaagaagaaggctgccgcccgcgaggcgagcggtgacgcccagcgcgacgacgatgacgacgatgacgaccgggcgccggtcgctcggacgacgactggaaacgccttcgacgacgcgctttacggctccgagtcggacatgaccgactcggagacggaggaggccacgggcgcccagcgtggcgaccagcgcggcgccaagggcaagggcaagggcaaggcgaaggacaacaagggtcccgactcgacgttcctccgcgaggatggcgacgagccgctcgacctgctcgaccggacgctggccggccgcctgagcagtacgtcttcgaccaactagctgctctgtgattagagaccatttgctaaccgacacttgctcgccctcttcagagaacgacctgagcgctgactcgcgccggcgcaaacccggacaggaggcctcgcgcttcaagacggacgccgacacgggtaaaatgatgatcgacgacggcaaggcggccgtcgacgagcctaccgccagcggaggcccagcgacggacgagcagctggccggcatggcctaccacgagcaaatggtcagcaccgagggccagattcgggacgccaagggccgcgtcatcttcaacaagaacacgaagcgcggccgggcgcgcgaggccgagggcggcgcgatggaggtcgacgagcctgggcggccgcagaaggccaagaagcagcgtcaacagaaggaggcgatcggcggcgagtaccgcaacaaggtgagtcctgtcgtggctccagcgtccgtcggacgatcacgatttgactatatctctcaccccttctcacagtctgccggcggagatgtcaagaaggccggcgcgcccgacccgttcgcctacattccgctcagccagggcaagggctcgaagaagggtggcaagtccaaggtcaacattactggcaagacgaagggtcgctcgcagtgatcttcctgtccgcctcctcgccatctgcctcctcttccttctctttgcttagacgttacgacaattgcatgccctctgtttttgcgactctgtctgcgagcctgctgctgttgttctcgcgcgcgcgggcccggcgctctggctcgatcgctccgcctgctcgcccccgctagggctcgccgccgcctttgccggccgggtcgctcgccgagaaccctcaccgccgcacgcttgccctgacccagacctcgccacgaccaggtacgtccggtctcatggctgccgctgggatgcggagcacaggccttgatgggtggccagggcggggaggtcgggcgccgcccgtcggttgaggcctgccacctcctgtctgccgtccctccggcgccgtccctcctgcctgtctcgaaaacgatctacgagccctctgctgaacagctgcttgcctgcccctcgcccctcgctccttctatcgcaggcccgccctcctgttcgtcgccagcctccgagctcgactctcgtctgacggaccgaggctgatctccctgtccttttgttcccatcttgctgcacctcctcacgcgccctgcttccctcggcggcctgctcccaatctccctcagctgcccttccaatcccacccgacccctccccccaaactctcaagcatggcggagaactcgagcaactacgactacctgtttaaggtcgtcctgattggcgactcgggcgtcggaaagtcgtacgtccgtctccgtctcgcgttcaccgtcggaagcagcagggtcaggtggagaggcgcagcgcagcaccgggccagtcaggcaggagggccggtcggccacgctcagtgtagccgcgacgtctcctggacggtcggcctctcagccatgcaggctccgactgctaggctggcatcgggaagtcggacgaggagtgggaagagctcgagggcgagctcgtttcgagctctgtggatcgacctgaaggctgactctcgtgacctcgcatccttcctcaacctggcctcccttgtagcaaccgtgcgtactacgccttcaccgaggccgctccctgatgatcgtgtctgaccaggctcgtcctccaacagtgctcggtcgtttcacgcgcaacgagttcaaccttgacaccaagtcgacgattggcgttgagttcgcgacgcggtcggtcaaggttgacgacaagacggtgaaggcacagatttgggacactggtgcgtcttgaggatcgaagttgggctggcgtgcgtctcggctagatgttgacgggtctccacttgctcgtccgccctgacagccggccaggagcggtaccgcgccatcacctcggcttactaccgcggcgccgtcggtgccctgctcgtctacgacattgccaaacagccgacatacgccaacgtcacgcgctggctgaaggagctccgtgaccacgccgaccagagcatcgtcattatgctcgtcggcaacaagagcgatctcaagcacctgcgggcggtcccgacggaggaggccaaggcctttgctggtgagtgtcgagctttttgtcgactgctgtaattggcatgctgacacgttgttgtcagccgaaaacaacctatctttcatcgagacctcggccctcgatgccaacaacgttgaggtcgcgttccataacattctcaagggtgagtctctcgtcgctgccgccgttgtcaagtgagccatctgacccacctcggccctccgacagagatctacggcatcgtctcgtcaaaggcgctcgaggcctcgaacgatgtcgtccggccggccggcggcgagaacatcaccgtctcgccgacggccgacgacggcggcgccaagaagagcaactgctgctagacgctctcttgttgagaaggacttctcgctgtgtgcttgcatcaagccataagcccgcccactcttgtacacgtcgctctttcgtctgctctatccgccgtcgctctcgctccccttccccgtccgtctccggacgacgctctcattcgcccctggtatctcgcgctctgtctccattctctgagcactccctctcatgatgaccctttgaagctcctgtggcggtctgaggccattgacaaacaagcgacatgggtcaggcggacggagttcagggaggtataattggagcgatgagatctgatgaaacatgagcaggttgatgagattgcggcgggacgacattgttcaggaagaagtcggtttgagagaggatgcttggcgacgaagatatgaaagaaatgggtatgatgagaacgctcagctgtccttgtgagggttgccggccatcgacttgctgtgccgaagcaggggtgccttgaaggaaacgccactcggcgctcggcggaggttgctctcggcgacgagcgcgtcggccgtctcggacgagatcgacgattctttacggtggtggccaggtcggacaaacttgaggtcgtccgacggtccgtaccggggcgaggcagtcgttgccgagcggcgaagggcgggtgggaggccgagctcggcggtgactgagaggtgcgccgcttggcgagactcgaggcgctggaccttgctcttgaccgagggacgagcggctgagccgcccgaccgcggcgagcccctgatcatgggcgactgcaagtcgaccgaattggctcgcggtggccctccagcgcgcagagcgtcgaagcaagggtcaaagtgctgcgagagatgccggttggtgaattggagcttgtcggcaaagctgatcgctgaaaccggcggcgggaaggcagccgactcgagcggcggcgtcgcctcggaatttgagccagagtcagacgacgcacgagcatcggccagcccagggacctcacgtgcagcaggcgccaccttcagcggcgacgccggtgaagcgtggagggttcgtgaacgatgcggcgaaccaaaccatgcgtccgccttggtggggctctcgcggccgttggtcgaagcgtagcccgacttggtgggcgaggtcgaaccgacaaaggcgctcgacggtgccttggcgcgaacaggcgagtcctccgccgccgttcgacgaagactgacgctcgatgtcgacgagcggagtcggggcgggcgcggaggcgccgcaccgtctcgagcagaggccattgtcgtcttgacgcgaataggagcagcagggctcgcaaaggagaacgacttgcgcttcgagatggactttgccggcgacgctggcgtgacggctgctggagacggcgtgagcacggagactgagggcgactcagagccgggtgtcggcgaaggcgtccgaggcttctgcatggcctcggggtggatgaggtcggtgttgatcgacagccggccattcgagcggaaagccggctcaggcgtagtggccgccgagtgacgactctgtgtcaaggcgttgcggacctcctcgtacgtcggctcgtaggttgaggtcggccggccgccggcgatcgtcgaagcgccgccccaagcgaggtttagacgcaggctcgggtgctgttgcgacaatcgcgatgccggccgctcaccgccgcgagtctccaagcctgcggcagccgtcggtggagaggcaaccgtgagagatgccgctcgagccgcttggagcatcgggcttggcgcccgtcctcggccttcagggaagcggggcgcaccgccgagggcggcggccgaggcaagctcgttttccgactcgtccgagtctgcgtcgtcgagcagcatcgactgcatggcctcgccgatgctttcggttgactcctcgaccgggagggcaagcggcagagccgggatggggaactcggacaggacgaatgcttgctcttccatcggcgtcggcaggttcgagaggggcgcgagtgaccgccggtcgtcgtatgcgaacgcgccctcgtcactcaggatggtcagggtctgcgacttgggcgaagactcggcgatggcgctcggaaggaggccgtcgccgaacccgctgttgcggttcctgtcgtcgagcgggtcctcgaagtggcctgaggcgagcgtctcctcgtcggcctcgtcgatcgtgtcgccagcggcaatgtgcgtgctcgcctcgacgagctttggaatgtcgacaccgaggtcgacgtcgtcgtcgttgtacgcatagccgtaagcgtcttcctcgtcgaagacgtcgccgtagccgtcggtctcgcgggcagcagcgtcgaccgcctccttgaggacggccatgctgaccttgcgccggatcaggccccggccctcgccgtcgtctacgtcggaagcatcgtcgtcctcgtcggatgagctgctgctccctcggttggcaacgcgaagcgggccttttgtactggcgccggtccggttgcccatctcgcccgggaaggcgagcgagcccatggagcgagccttcttcagcgtcgaggcgagcgtcccgctcgcaaggctcgaggtcgggccgtgcggcatgcgcgggcggctgatcgtgtcgtagccgataaggccgtccgtgtaggcgctcttgggcgagtcgtgcggggcggcgtcggtcggaagcgccgctgcagcgaccggtgcggcggtaagaccgcgacgagctgcgaggttggcagggacggccgtgactggcatcggcggccggtaggtcgacggcggtgggtcgatcgagatgaaattgacgatccggatcgggacctcgacgtagaccttgctgtcgatgcagacgcggatcgtgtagccgacttcgatcagccgaccgcgcgggatgctgagcgcgtcgggctgttgtagaatgggaggctgtcagcgctagtcttggctcgaggacccgctcgtcgtattcgactcaccggaaggaggagcgacgtcgaccatgtgccagccgtcgtcggtgcgcagccagaaaaccaacccttgcccgtgatcagccccttgccgctcgcctgcgcctcggcgaggacagtctcagccatcttcttgctctttgtcgaggttgagcccgggtcgaggttgcccgagagcgagttgggccgggtcgacgtcagcgacgggtggtagaggacggtcgtctgccagagctggaccgtgagtgacttgatctgcgggtcgacgagagcgggcgttagatttggatgtcaaaaccaacgcttggcaagctgtttttgaaacgcaccttcttgctcgtcccgttgtacatcgaaatgtcgacccagcagctcatgccggcgacccagacggccttgccgaccttgacgccgagctccaccccgcggccggccgggttcccaaaactccgagcattttcgacggcgttcccgccggcgctgccgaggaccctcgacgggtcgatccggggatagatgacaatgttgcggtagaagtgggcgattgagctctggccggtgaacgggaagaagagcgagagtgagccgatgaggatgtagcggatcgcgctcgacgccgaccggtgggggccgcgcggaaagtcggtcaggggcagagggaggtggaaggggatcggatgggagcccgggtgcgaagggtgatgcgtcccgggcgttgcggtgaaaagcgaagaccggtgctggttcgccgcgtcgccgggcgtgaagagcgggagcgtggcagagtggtggtagaagatgtgccggccggcatgggacgggacgtcttcgaagccgacgagtcggatcttgccgaggccaacgtggacagggccctccttcttgggtcccggccgaacgacgacaatcattgtacctttgacgtcgccgccctcgacaaggatctcacgctcgaggtcgacgctgcgggcaggcgacagaaggcaggggtggtcagctacggcagaagacaccgaagaatgggggtctcaagcagcctaaacgcactctagcgtgactctggccttgcgtcgaccggcctcgagtctcgcgtcgtcgtcggcccgaccgtcggcgtcgccgccgagcttgcgggacgatgggctctttgcgagcaagcgcgagagctcgtgtgacgaccgctggggcgaggccgtgtgcgacaggagcgtctggctccgattgaggcctgagccggaagccgcgcggggtcggacgggtcggacgggcgaggcgcagggtggtgcgcctgacgaggtcgtcggctgctgttgaccgacaggcgagctgagggcaggcacgttgccgagcaccgtcgtcgacgccccccggcggacgtcctcttcgacaccggcagtcgtcggtcggccgccgaggacgtcgccaaaggacctgctccgctgcatgcccggctggtttgggccggctgggatcgcctggctgctgctgctgctgctggcgagggcggaggtcggagggtgagggccgccgacatgggcgctgcgcttgcgctcgggtcggaggctctgctgtgcgagctcgaaaggctggaggtcattgaagtcgatctcggcctcggaggccgagtcttcaaagtcccaggacgggtgcgagaagggtggcatcgtcgtcgttggcgggctgaagcagtgccgaacgcgtcgaggtcagtcaacaaggtcgtcagcataacacctggtgtaacatctgcgtaagcgtgcgtaacgctcgatcgcgctgacgcacggggcgactctccggctcaagcctcctgtcgttccctccgagccgacagccagccagacaacgactcgacctgctcgacaagatgggcctcaacaccgccaccattgccgtccacagtgaacaccttctcgtcgagagcgcaagctatctaacacgagctcgcgatcctgacgtcccttgcccgttgctccctcccgcagcgacgccgaccgtcatcggcaccttcctcaagcacatcactggttcctcgcgccggaagcgcggcactcgcaggtccaaggccgcgaccgatgctgcctcgagcacgaccgaggcgggtgcgtcggtcgatgctgctgccaacccagacggtagccggcagacggcgtcgtcgtcgtcctcgagcaacctcgcagccgtcgaggagtggccggacgaggacatcctttacgacgagggcctccagatcgtcaagaagtttctcaagacggccaagaggtacgtcgtgcggactgtccagtggtgccgtgcctggaggcctctcctcgagaaggagactgcgctccactccccgacccccctgtcagatgccgaccgcgaacagacgctgaccctgtctctttccaccagccacacggtcgaagagctccagtcgtttacggcgatgcacgtcccctctccaagctggatccacgtcagccacgcgaccgtccccgccgactcgaccgaccgggcggcgaccctcctccgcaagcactttgtcgacgtctacggcggcgcggatgagctcggcggcgaacgttggtggacgctccgcggccggccgctcgagggcgagtttatcgagatgcgtcgcgacttcttgcgccggacgttcgacaagacgcagattgccgtcggcgagaaggaggcgccttaccggcaggaggagaagtgagtcattctgcgcgccccgtccgagcacttgcctcctgacgatctttcttctctttgcgactcacagagtgatcctgtacctgcacgggtgagtccctccccctcgttgagaagggtaagacgctctttgctaacttacccctctccctgctcgcagcggtgcctacttcttctcgtcgctcgacacgcatcgataccagatccagcgccatgcgcgcctgctcggtggccgggcctttgccccgagttaccggcttgcaccccagtatcccttcgtgcgtctccacattgttcatacttgcgactcgcgagctgaccgacgcttcgcgtcttcccagccctgcggcctccaagatgcgctggcgtcgtacctctacctcgtctcgcccccaccgcatgcggctcatccagccatctctccggccaacatcatcatctcaggcgacagcgctggcgccggccttgtcctcgccctgctctgcgtcatccgcgactcgggcggcgaggtcccgatgccggccggtgcgaccctcattagcccttgggtcgacctgacgcactcgttccggagcatcatggccgacgacagcaccgactacatcccgtccgagggcttccactaccggccgtcgcttgcctggccgccgatcgcgggcgatgcaatcgagatcgaggtcaagcatcccgagacgggtcagaaggagacgcgcgtgctcgacgagcaggtccagatgtacacctcgaaccggacaatcagccacccgctcgtatcgctcgtcagtcaaggctcgctcggcggcctctgcccgcttctcatcgccggcggctcgggcgagctgctccgcgacgagcaaattttcctcgcgcacaaggccgccaatccagcacgctacccgccgtccgagacgatcctcaagcgctacccaaagcagagggcgctcatcgacaaatatccgccgaccaaagtccagctccagatgtacgacggtgccgcgcacgtcacgccgacgctcagcttcaccggcccggccaaggccatgtaccgggcgacggccaactttggcctctgggcgctgaccgttgccggcctcgccgatgaccaggcgcacgagcgccgcctgcgtcggtcgcgcaagccaaaggacagcgggacatcgtcggttgcctcgactgaggccatgtacggcacaaccatcaagacggacgacggcgtcatggccgcaccagtgaccgacgcgcttcacggtcagtcctcatcgactcgcgggctttgagcgaccatgcagatgactgatcccttggccctctcggctcgtgttttcgcagagctggccaatgcccggacgcacggcagcaacgccgactcggactcgtcggcatcctcagcgggatcgtccgacgaggaggaggccagccgctcatccggcgctggacccagtaccaccgccggctccggtaaggttgccgtcaccggctcgcttcccaagtttcagcactcgatgatccgcgagcgtgtctcggtccgcggcgtcatccggccgatggaagccgtcgaagagtgcgagacgttcgtcggcctcgacctgcaggaggtcggtgccgtgcatggttcgggcccgatcctgaagtggtgcgtgctgctcgtctggtcggtaacctatgctcgtgggtcgctgacatctttcgccctgcgcacccaggctggccgcccgcgaggagtgggactccaagtactggagggagctcagccagttccggtccatcaagcgcgctgaccggcagaaggccgagacgggcggcttcctcacgcgtgccctgcagggcgagcgcccgccgctggcgtcccttgccggctggtggctcgaggagtacgcgctcaaggcgtccaagtcggtcgactcgatgggtccccgagcccagggcggcaagagcgtgtcgggcgccgttgcgctgtggatgcggatgggcgagaaggacgaggccaggaaggccgagaagccggcgcacacggcccagctcaaggccatcgagcagaagctcggcgatctcggcgtcgacgaggaggcccaggcgaccctcggcgaccaaaaggttgaggcaatccgggcccagcttaaggaccagggcgtcgatgttgctgacgagccactcgccgaggttggcccggcaggcgaggacctcggtctcgttgccgaccgtgtccaggcaaccgacgacgtgctctccggagcatcgtcgacgaacggagcgccgtcggacaagctcgagtctgggcctgtcaaggcatcgccgagccccaagaatattttgctcggccggcaggtcaagggttgctcgtcctcgcagcactagtggcctgtctcccacccctaactcacgaccacatagcttcccctacgatcccctacttagagcaatccagacgacgttaataaacgactcatgatacagatgcaaacccgtgctacgcgttaccaaaagaacgaagggggcctcattagtattcctcgggcgacttgagcaccggcttagtgtcctcgggcgcagtcagcaggatcttctgcggcggctcctgctttgcctctggcgtcgtcgccttgttgggcgtcggcggctgaacggcgacgtgctcgtctgggacagcgggcgactgggcccgcttgtgcgccggtggctgcgtcgagaggacctcctgcaaagtatagcgacggcgagaggcgcatggggtcagacaagagcagatctgcagcagcgagaaggtctgacgcacgtcgccaaagtaggaccgcggcgtggagggcatcgtcacgacggtgcttcctgccgcgccggcgccctcggtcagcggcctcagcagcgggttgccatgcatgcccgggatctttggcgtcgaggtcggcgacgccttgcgcgacggcggcttcggccggtgtgtgtcgacggcggcgatcggaagcgagtaactgcgaggaagggcaggaaaccgacatcagcaagcgctttagaggccaagcaagcaaagctaagggcgcaccgctcctcgtcacagccgtaggccttgggcgtgagcttgatgagcgtgtggagagggatgctgatgtacggcagctggtcctgggcatggcccatgtagtaggcgtagaggcagcggatgatggcctggtggccaataatgaggatgttttcctggcgctcgagctccatgatgacgggctcgagccggacgacgacgtcgcggtacgactcgccgccccggtagcggtagttgaacttgtcctcgtcgcggttgcggtagtcctctgggtagcgctcctcaatctcctcgtacgtcatgccgtcgcagacgccggcgtcgagctcatcaagggacttccacgtcttctttgggtacggcaggtgctgcgccgtctggatcgtccggcggagcgtgctcgtccagacctggagcggcttgtcgccgacattgtcgaggatgagcgacggcagcatcttcgagtactgctggccccggggcgagagatccgagtcgccgccgatctggccgccgacgttgtacattgactcgccgtgctgcagggccgccgcgaatgaggatgtcagcgagcagatttgacagaggcgccggacgcgctacgcactcgcgagaggaagatggcccgcggcttgaggtggaggttcatgaggtagtaggcgacgcgcgactcgaggtagccgccgatccggttaatctcgacggtccggccgacgttgatgaccttgcagtagctgaggtggggctcgtcgacgggctcgtagaccttctcgtagttggcgatgcgctgcttaaagtcggcctcggccgcctcgcgcgtcatgtccttgtagtcggggtcgccggacgagaccttgagcgcgatgttggttgcaatgaccgagacgtcgtcgcagatcgactcgaggaacagcaggtgaatgccgcgctccttcgccacacgggcggcaatggcggctctgcaggcggcacaggatgaaggtcaggatgagaggcaggtcaggtgaagacgagagatgaagacggacctccgggccttggtcgtgttggtcgcatctgcaggtgaagacagagtaaggacggagacctttcatcgcactcgcagaagggcgcagcacgcaccgtgaatgccgacgttgccctcgcgcttgagccagtcgatcagggtgtcgagcgactcttcggccagctgctcgcgtacgcgcttggcctcggcgtccgagtggtcaaagtacttctcgccgtggttgacctggcccttgggcagctcgcgcgccttgcgccggcgcagctggccgacgttgaagaccttgacattgaactcgagccactgcggtcgcgtcacaccgaaggtcaggtcagtccaaacaaggctcgcgtccgtgacagagcaagccgcacctgcaggtaccgcatgagcttgttcgacaggtacgactttccgcgggccgggagaccgacctgcaaagcacgaaggggtgaacgggggaccggtcagtcggcagcacgcagtcaggcgtcgtcagatggagacataccatcgcgacgacaatcttggcacgcgagtaatctggcttgctgactgtcaggctcgcaggaggatccctcagtcagtcctcaggcttaggtcgcccttgagcagagccatctgacgcacccgtgttgccgatgcccgtgacggacggagctcgggtcggagcccgcgaatttttcctgctgagggcggtcttctgatcgagctcggtaaggctggagccggagggatcaagcgaaggggatcagctgcctgagatgtttacggccaaagcaggcctgcggcaagctgcgagcgacaccagaaggacgcacagcggcgtcgtcgcgccgaagaaggtattgcccttctcaccgtcgttgctcgcatcgctcccctcacgagcacgggtgcccgggctctggacgagactctcgccgttctcctgcttgagcgcgtgctcctcgagcgcgtcgttgaggcccgagagcgacggcgtcgacgacgagtgatgggacgagtgcatggccgagcccggcgtcgccggctgcgagagggcgaggtcctccatctgggcgacggccgtccggagcgacgagtgccttgccggctcgaacgtagggttgtcgggcatctctggaggctttggcgagaggtgttcgaggtggcggttgacgagatggtccagtctctccaagtctctctctctcattccgcctccgctccgagccgctgacgacgacgacggcgagaacgactctagtgaccctgccacccctcgcaccttccttgcttacagcgacttgcctaggagcccatcagagctggtctcgtcgttgacctgcaggacgccatggccatgtcggtcccgttcccttgggccagcttgctcatgccctgacgcgctgcgccgtggcactgacccatcctggcggcccctctgatcgactgcagcaaggacgccttcgagttctcgtcccgggcggtcgtctgtcaggacatcgacatccgtggcgctgtcaccattggaccaggtgcgaagagagacccttgctaatcagggccatggctgaccctttgcccctccgctgcgccgacgacctgccgacttgcgccgactaactctctaggcacgatcgtccatccgaaagcgaccatctttgccgtcaatgggccgatcatcatcggctcgtgcaatatcatcgaagagcaggctgtcattgtcaaccggcagcgcgagcaactcatcatcggcgacctcaacctcttctcggtcggctcgcgggttgaggcgtcggtcggcgacttcaacacgtttggacccaagtcgtccgtcccggcgacgatgcgcatcagcagctgctgctcgctcggtgccggcgtcgccctcctaccggctgtcgacgctgatctcgctctggagagcgtcgaaccaatcgctgaagacccaggggacgacctcgagccggcgaaggaggcttcagatatgcttgagccctacacggcgctctggctgtcggacgacggccaaggtgtcggtggggcgcgtactttcaagcgcagggtgtgggacggcaagggtgaagaagcagagcgcgacctgcgcatgaagcaggtcatgtacctgaaggacgtgcgtccttcacttccgcagacgtctctgcgtccaaatcgttaacctttcgctttcgcacgcagatgctgcccaaggtcacccggatgcgagtagtctgatagagctttcgcagtcttttgtcgaccattgactcgaagagtcctttgcggtcgcgccctcgatgctatcaccgtgcagccccgtagcgctgctggcacctgctcatgtcgcgacaacctccccggctgagccgttgctcgccgtcgctgcaacaggcacgtaggcatcgcagcctcagcacgttgatcgcagcaaggtcatccatgatttttgctctacttcgccccggactctcctgcgagcgcgccctccctgaccgccttcaggagctcggcgtcgagctcctggctcggcatggctgagatctttgcgagccacttggtcgcgagcacgtcaaactcttgtaggagtgccgtcgtcggtacggcgacgcctgaggctgagctcgccgagccgccagccgagagaagggtgcgggtgacctgcagacacgttgcgaatcagcgggcggcctaataaggtaatgggggacggcggacgtacgagcttgacgccgtaccacgccttaaggctgatgtcctcctcaccgttgccgggcttctcagagatgttgaggcagagcatgtagcttttgaacgcgagcggcaggtcgccagcggcataggccgcctcggcgtggttcagaaagcgcagcggcgactgggcctcaatcaggagggtgtgcgagagcgcggcgaccgcttgcgagtggctgcaaaggacgacgacggttcagtcagcagctccgctgcgagcgagtgtgagagagagccaactgacagaccgagcgacatgtagagctcgccgagcaggttccagccttcgacgtcggtgtagaaggtgtcgaggtactccaggagcatgcctatccgatcgctcgtgctcagcgacggcagcgacagcaggcggcggttggccggctgcagcactcggtcgagtatagagtcagtgtgcttccggtcgctcgaaaggaaagcggaaagaggcgcacgatgttggtctcgtccgaggcgaggatgttctggtagacgacgacggcatcgtgctggcgcccgctcgcctcaagctccatcccgtgcagcacgtccactcgcggcgagtctggaaagcgctcagtgagcttctcaatggccatctgttcgtaggcatggcgaggaaatcagtgtcgggcccaagcagatggagggagccgggagctgagggcgctccgaccgaccttagcctcctggatcttgccgagggcgagcgcagacatgacgagctgctcaagtgcattcgactctgatccgtcagagggacaggcttcgatcagatcagccctcgctcttcagtgttcagcaccggcgagctggccggctcagaaggaaggagatgagcgtaccctggtcgaccgcgcgacgcttgcccttaagcaaggccgatgcctcgtcgtaccgcttctggacggccttggacgtcgtcggtgcgtccggcgagaaaacctcaaagtaggcagacgacatgctcctgggttgagagaggggaaggggctgaagagaggccggaggattgagcgtggtgagggtgtgcgggctgagccgcctcgaggccgcgtcgccgctcggtctcctggccgggcaagcggaacgtacgcatcggtgcttcttcgacgggcgcagacgacgagacggtcgagacgagcttctataatgagatcctgaatgtgtgtgtgtgtgtacaacgcgtcgccctctccatgaggccctctaagggacgtggacctttccgtccttggtccagccctcctcgatcatgacctcgccgacgctctccatgacggcgaccgccttctcgcactccgcctttgtgacgttgaggctcggcaagacccggacgcagtcggtgccggccgttaggagcaggacgcctcgctcacggcagagctcgacaaagcggccgggcatcgtcgtgtttgagaacggaatgccgaggatgaggccgcggccgcgaggcggggccgggataagctccgggaagagcgtcggcaggcggttgagaagcgtcgacaggtaggccgaggttgactcgagctccgagacgaaggtcggggtcgaaagtcgctggaggacgtggtgcgcgagccgggtgcaaagcacgttgccgccaaaggtggtgccgtgcgagccgacggtgacgaccttgacgacctcgtcccggacaaggatcgcgccgattgggatgccgttggcgagcggcttggccatcgttacaatgtcaggctgcgcctcggccgggtacttggagtgggcccacatcgtgcccgtccggaagaggccgcactgaggtcaaaagcgaggagagggtcagcggtgagcggacatctagcagaagagttaggcgcacctgaatctcgtcaaagacgacgatggcgccaacttcacgcgcccgcttgacgaccttgccgagccactgcatctcggcctcgtacagaccgccctcgccctggatcggctccacgatgaggccggccgtgttctcgttaataagctcctcgagaccctcctcgacgttcatcttgccgaccttgatgcctgggaggagcggcgcaaacgggtcctggtacttggcgttgggtgtgaccgagagcgcgccgagcgtccggccgtggaaggcgcgctcaaagcagacgatgtccgacttggccggctggtcgttgtacttctcctttgcaaacttgcgcacaaacttgagcgcgccctcgttggcctcggtgcccgagtttgcaaagaagaccttgccggacgagttgtcggccgtcttggacgccggcgtcaggccgagcccgccgtgctccttggtcaggtcgacaagcagattggcgcacggaccggcccactcgttgtggtagacgttggacgagtgaatgagctttttggcttggtcatataggatctcggcgatctgttgaagtgcggtcaaggtgacggtcgagccggaagggtcagctcgcacttcgctctgcagagctcataaccgactctcgagtgggccgcaaagcaccaaggtcatccggacgcacctgatcgtcagcatgcccgagcgcgttgacggcgataccagccgagaagtcgaggtaggcccggttctgggtgtcgtagataacgctacccttcccgtgggtgaagacgatcggcggccgggcgtaggtcgagaggagaccctcggcctgctgctcgaggaacgactggacatcggccggggcgggctggtctgggtgcgatggcttcaggtagctcttgtcggcctggaacggaaggagagacgaagcgacagaggtgaggtcagacgagtcaggtcggctgcgcctgctcgaagctccgagggaaagggcgagcagcacgggcagctgcgagctcacctcgagcgtcgaggcgtagcggacagagcgcgccacgggtccagcccgggacgtagcacgaaagacggaggcggccgagcggagcatgctggcaagtctacgaggagcaaaaggtgagggttggtccggaggcaagggcagaggcgacgtttgactcggccagtcgaaatcgccccaggcggcaaactccgcgcgtcgtgttgcggtgtcagggtcgacgacgagccgccgtactaaagaaagctcaagtcagacgtgaagatggcaatggcgcggccttcctgacaattcaaactcatgcatgttcactcttgcgaagagcgagggcggtcgacaactgctgcagcactgccagtgcaccaggtcttcggcccacacgacagtccaaagtattgacgcttgtcgcactcgtctgctggtcaacaccctcctctggcgcctgacgcccctctaccgagacgctctcagcaggcgagcggtggtgccttcgattttggcacgactgcctgagagcgacgccgtccgcagagcgcgttctttgggcccctttttgagtcagtcacgagatcagtcgaatgcaagggattgcaggatgtcagctcgacaagcgggacctggccgagatgcagatgagatcatgaaatgtgcgccggcagaagacttgactcccgccgcgccgtcgccgccttcggctctcgagctcgtctcctcttcgagacagctgcatgctgacctcttcaggccgaggtgtccatacagccttcctcttctccgtgtcactcgccccaaccgcttagtgggcggcgtgcgcgccgtggtggtgcgggtcctgctcgaatcgcagtccgcagtagccgcatgaccgcggcccgggctggtcgaggttgatgtagaccttggggtggccgagcgcacctcctcctgtgattttgaggaaccaggcagtcgtgcaacacaggtcagtaggttgcaggtcagagagcatgctcgcgaccagatgcgagcgagctgattcgtccttggacatgaggcggcacgcacctccgtcgcagaccgccttgcggccctggaccatcatgaccggcaccttggcaatcatctccatcgcgctcagcggtcggggctgagcctcgagcgccgtctgctcgaaccgagcgccgtcgtaggcgacctgccgaggctgctggctcggcgaccaactgcgagacgagcgagcgcaagcgcgatcagcaatggcagtcgagccggctggagccggggagctgctgtaagcacgcacgtcttaggcaagttggtcgcctggttaacggccgcgccagtcggtgccgtcgacgagacggccgtctgaggcgagcccgtcgcgaggttggcggcgtggtcggggctcgtcggctcgtctgccgggccggcggcggccagacgggccgaggtcgagagcgcgcggacggcgccgaaggagggctggacgagccgacgggcggcagagaaggcgagcatcgcgggcagtatctggagaaggacgagaaggtaagggaggaggacgaggagggccgagcgagagcatctcgggctgagcggcgcgggcccagacggaccccaaaccagactccgactcttgggaaacggcgctttcaggctcgcgctcctctctcactacgacctcgcgctcctccctcttactcccttaccgccgtccttcctcgcgaacgatgccccagtcgcacggtagccagttggccaagtttacaaagggctcgcgacccgtcaagaccctcctccggtgcgtgatcgcgcgcttggattgggcggcgcggtcggtcgcgtcaacccctcagggagctgatgcggtgctcctttgcgcttcgacagagggctcgtctcgtccgtcatcgagcatggccacatcgagacgacggtgccgaaggccaaggcggccaagaaggtgctggagaaggtgcggcccaagcggtccaacgtcgagctcaagcctcgagctggcgtcgatctccgtctcttttctgctcggtcgacctcgagctgaccttgcgaactgctggccctcgcctgcatctcggcccctcccctcgcaggtgatcaccgccgcccggaagggcacgccagagtcgtttggcatgacccaatcgtggctccacaaccaccgcgtgacgatgccgaccctgcacacgactctccgcgagcgctacgccgaccggacgggcggctacgcccggatccacttgacgggcagccgcgtcggcgaccgagccgacatggcgattctcgagctcgtcgacgggccgggagagctccgtttcgagatgctcgcgcgcaagctcggccgcaagatttatgaggaggagctgtgcgtcctctcatcggcgaactcgcgatggcctgctgttgacgccctgctgatctcggctgcctttgatcgacccaggcggtcgctgcgcaaggtcgacgtgttcgacaggcaggtgctgggcgactacgccaactggcatctcaatgactcaatccagaaggcgctccggtaccgaccagaggaggcgcaggaggagttgcgggcgaaggccgaggcctaccgggtgcgtcctacagatacagccacttgcgaaaggcctaaagcgtctgaccgtcgatactcctccttcaggatctcttgcgggcagaggagactgtgtacaagaaggcgacgcagacgtacgaccgccggccgccggtgcctgctgggtccgtctccacttcctgcgtgccgctgcccgtagaagtattacttaccgcccgttcctttcctctgtcaccctctgcagcaagcgctttgggtcgatcgcgctccaggacgagctgtcagtctgctttgcgccagcagaccctcttctgcgtgtccatgactgacgtgcccaactctcttcaacgaacgcccaggccggaacacatcccagaggcgccgacgggtcgcgaggttcgcccgggagagctccttccggcgatggcgatcaagacgccaacgaagccggtgcctttcgtcgaccgcaataagtgggcgcgcctaccggcaaagtttggcggtcggggtggcttccggcgcgagggcgccgacggcacgccttcctatgggactgggctcggcgagacgagccgtgtgcccggcgtcgacggcgtgccgggcgatgcggctggttggcggacagacgtcggcggcggcaacggcgagttcccgctcagccggtcgcccatcaagctcgcgcggcttgcgctctgcaaggaacggacgcccatccggcgctggcggcgtgacgacgacggcatgggaggctagacgaccggggtgcctctttgatggacccgacgcgaacgcagctgttatctccgccgattggccgagaagcggaggaattgaaggagtgcagtcggtgggggcatgcagccggtggagtcatgcaacctgcgacgagcacacgatcagagaactcgtcagcgggtgggttttgccatcagccgttcatgcaggaacggagcgacctcgacctccaccttttcgccaaaagcccgatggtcggtacttaagagggcccttgttctccgaggagagtccgcccgctgcaccttcccacccaaccaccatcattacatcagctccctgcatcatgtctatcactaccctccctccttcgcggctcaagtttgagaagcagccgggacccaagccgatcgacacggcctcgccagtctacaagaacgtccaggcgacgctcgcggagatggccggccagacccacggcgattttagggacgagctcttcaaggagggtgcgtcgaagaatgccctcggcagatctgcccagcatgaggactgactgagcgctgattgatcgcttcaggcgtcgtcgttgtcaagggtgcgatcccggccgaccgagccaagctgtacgcaagctcggcatacgacttcctcgagtcgttcggcctcggcttcgaccggaacgacccgtcgacctgggagagcgccaagctgcccttctcgcaccgcggcgggctctacaacggatactcctgtggccacgagcagtacgcctgggacattcggcaagagcctggcgtgatcgacgcgttcgctcgggtctggaacacgaacgagctcctcgtcagtttcgacggcctcaacatcagcgtcccgctcgacctcgacaaggagaaggacaaggagctcagcctgccctggccacacgtcgaccagagcccgacgaggcagttcctgcactgcgtacaaggcatcgctaatctcgcgcccaatggcccgctcgacggcggcctcatggtcctccgcggctcgaaggagctcgttcgtcctccttctcccagtcttttgatgaatcgatcgcggctctgctgacgtcggtccctctttgcctcaaagtacaacgacgtctttgcgcgctttgaccaccagaagcccgagggcggctggacgctggccgactcgtatcaccacacgcccgagatgctcgactggatgatcaaggagaagggctgctactggcagaaggttgtcgccgacccgggcgacctcattctctgggattcggtcagtttcagtcttgtcggcgtgcctcgttttgagtccgttgcacggtgactgaccttctgtctacctgcctcgtctgcagaggaccgtccattatggtcaggtgcctctcgcaaagaacccgcgcattgccacctgtacgtcactctgcatccccagacgttgcaaggggtcacacagcctgacactcgaaccctgccttgtcaccaagatttgtgctacaagcccgcggcgctggcgtcggaggacacgtacgcggccaagaaggcggccttcgagcagcagctcaactgcactcatgacccgacctctttccagacgatcgtacgtgcatcaactgtccgttggcgtgctgtggggggatcgaagggcttacaggggaggggaaaaaaccccctctccctccgccctcccgcctaggcgtggacgcaaaaccggccctatggcacgcgctccgccatctgtccgctcgtccgccgatgcgagggttgacatctcggttgctcggtcgaaggagcgtcgcatgcggcaagccgaccggcaactacggcaccaaggcgatcggaaagctgacgcaccttgggcttgatcttggcgccgtcgggcgtcctgaggcgatccggaaaagagaggagacaaagtcgtcagtcggcttgtcccgctctggcgagatctccaggcagggtcgaatctcggacaaccggggcacgtccggtacgagcacgagtagatgggggtaagagggcttctcgggcgcgcgcgagcgtccggggtcaacgggacgtgccgtcggcccgcctgtctctcaaccacccttggccccgcctgctcggccggcgaaagggcgaccgagcgccctccgccttccgccgcccggtgtcaagcatcgcgcatgcagcgagcaagcccgagacgcggctgatgagcgagctcgcttttgggctctgatagggaagagcgatggcatgggctgaaagggaggaagcacggccagagggtccggaggcgacgggagcatccgacggcgaggtcggacggactcctccgcctcggccgtcgggggacaagagttcctcctacttaagcagggagcgagcgagcgatcgctggcggattggcgatcccaggcacgcgcgcgcgcgtcgccgctgagatgaagagcgagcgccggagcgagagcacgagcgaaagagaagtgtggacaaaagccgggaacgcaccacatgtagaagaggatcttgttcctgagcccctcgcccgagtcaaactcaaagtcgtagaccgcccatcggcactcggtctcgggcaggtcctccaaaaacgtctcgtagctcttgtcggtcgacgtcttgaggacgacaatctcggtgttgtcggccgacatgccgtagacgatgtactttgtctttttgccggccttaagctcttggaaggcctggaggcactcttcggcgactttgactccggacgactggcgggatgggcggagggagagagaacagggcagggcaggaggaggagggaaggcgggcgaagcgaagtgagtcgtcgtcagcccacagctcgacaagctcggtcgcggtctggcgggcgcgtttgatcggcgaccaccagatcgagctcggtagtgcgaagagcaagcacgcaccatggctgagagaaagagaggaagggggtgtaggaagggtgaagaggggatgatggacgggagaacgaggacgaggccatctcgccgcgaggaaaagcgcgcggagagatggcggcggaagatcgctcgactttgatcgatcagggcagatcatgatgcgactctgagtgattcgactttgatggacttgtagttcctacagtcgagcaatgaatatatgccttcaaccctcacctgaaccctttaccaccctcaaacggtcgttcagctcctcctctcggccatggccctctctcggacgctcgcccggattccgcaaacgctcgccacgcccagcgttgcaggcccatcatgccgtcggcgactccagacggccgcctttaccgcctcgacctcgggcgcgccggcgggctcgtccgccgagggccgctcggttagcaagaggccgttcgacaaggtcatcttctcgggcatccagccgtccgggacgatccatgtctgtcctccttccgtatcctcgcgtctctcttgtcgcccaacccccgctgaatcgcacgaacgtcctccatcccgacccgcccgcgcgcccgccccggccgcgcgcagctcggcaacctcctcggcgcgctcgacaactggcgagccctctcggccctcgagcccgccaacacgtcgatcctctactcggttgttggcctgcacgccatcacgctccctaaagacccgaaggtgctcgagcgcgagaggagagagatggtcgcgtcgttattggcgatgggcttggggaagggcgggagagaggtgctcttctgccaggacatggtaagcgcggggtcgtctcggaggactctctgacgacgacgctcgctgactgtcggccattctgcgctcgaaggtaccggagcatgccgagctcgcctggatactcaactgcatcacgccgatgggcaagctgcagcgcatgacgacttggaaggtacctcctcccttccccccttcctcaccttccccactgggagctgacaacccgtccatttccctccatcccacgctcgcgctcacgctcgctcgtgccagggcaagctcgccgtgcacaagaaccacgcgtccgaggcggctgtcgatgagtcggacctcaacctcggcctcttctcgtaccctgtcctccaagcggccgacatcctgctttacaagtgcggtcccttcgcctctcggcccgccctctattcgctgggcgctatttactgactttgacttgtaaactgcggtatcgcctggcgccaaacaagggggacgcacgtccccgttggcgaagaccagcagcagcacctcgagcttgcgcgcgagatcgcacgctcgttcaacgcacaattcgcacctcggaaggagccgttcttccctgaaccgcggtcgctcatcagtacgtcctctctctctctgtgccctcgcccgcgtctgtcctgcaagggattgaccgtacgacctgactcctcgctcgcccgacagccccttccaagcgcatcctctcgctccgcaaccccctcgagaagatgtcgaagtcctccccgctcgccgcctcccggatcgaactgaccgactcgcgctcggcgattgcctcaaagcttcggtcggcgatgaccgactcgctcggtggcgtatcgttcgacccggtcgggcggccgggcgtgtcgaacctgctgacgatccttgcggcctgtcggggcgcgacgcccgagtcggaggcggatcggctgagcgacgtcagcatggccgagctcaagagcgaagtcgccgatgcggtcgaggacgtcattggtccgatccgatccgaacttgaacggatgctcggcgaggaataccttgcggatcgggcaaagggcggcgtcgcgggcgtcaggatgaaggagggggcttatctgcgcgaggtggcggaacggggggcgcgggaggcgagggagagggcggcgcgcacgctcgcggaggtcaagagctcggtcgggctcagtcgcttctgactgatacgtgccgtttcttagatggcgtagaatcgacttgcaacggggcatctatccggggcgggaacggtaggtgagccgctttcaaggggagtggcgcttgtccgacgatgagacgggagcagcgctgagggcgcacaggccgacgatggctgcgtgcattacgaacctgagtgtgagtagcctggtgcttacttggccgcgtgcaacaacctggcgccaatgaaggaagaaagctcaacactggcctctcaaggttcttcaccgtcgctgtcaaagccgttgtacgcctcggcgacaaagccctgtgataaagggcgcatcgagtcagccgtctcgtcagccatctgcgaagggggcgggggggggggagaatgcgtcgagtgtgactgacgtggtctgcgcgatgggaggcaggcaggcgaacaatcgaacggagtcagtgttgcgcagggaaaatcgacagagggctctgatgtcgatggactgacagtcgtacgcgatccgctcctgctcgtcaacaggctggccgtccgagtcgacctctccgctccgggcggccgacctgtcgcagaaccgggtcagtccctggcaagcggataaggaggtggagagaatgtgagagacgcacttgaagaagtggaccgtcgcttttggcaggtttgacaggcggaggtcgaggtcggtcgcataatcctagaagccggaggggggcgacgtctcagcattaagcacgacggttgctcctacgggaaagttaaagtcatggcccaccttcccctgcgccagctcgcggaaggcgtccagcagcagatccgggtcatcgtccgactcttgaacgagctcggccatgagcgtcgtaaacgccttgtacgtcagcgcgccgtgctcctcaacgagcgcctcatagaagctgctgatctcctcctcctgcaagttgcgctttcagtcagcgctgacgtcgggcgatcaggagggagcaggacaaaccgtgaacgagagcgagagcgaggcgagtgcgccctcgagctcgtcctgcgcgagcgtgttgttgccgtccttgtcaaagtggcggaatgtcgcctcaaactcctccagctgagccggagagagctgtcgaagagccgaaggtgggcgtcagcattcgcagacgggaacaggtgccgcagaattcagagtgaagggctgacgtcagtcgtctcgcgcgagacaatctttggcaggccatccatgtcagcacaagagtccgcatcactgtaactctccaaggaagccgcacctggttatcgatgacggcgactcgccgactgagactcagcttaagcagctcgcactcccagccaaggtcatcccagctgaggaccgtgtagtcgttctcgtcaacgaaagcctcggcgcacccttcctcggccgcctttaagcgcacgaggagctcttcaactggcggcacgcggtcggccaagatggcgacgacgcccgctttttgctcctgtcgggaggcaggcgaaagggattcatcagtgacacctttgatcagccacacgccagacgacgcaccgtcaactcgccgctcgcgctgtagagctcgtgctcgagccggcgcagctggccatggacgtcctcggcgaggtcggccgctcgcttcatgagcgcgtccttgatcctgcaagagcggaaagcgagaatcagagtccgttccggcgctcgaacgagcgacaaagaggtgacggaccctttaagccgctggccgatgatgcgcgagtaggcctcctctgcctcgccaagcgcccgccactcacgctcgacgacctcgagccggcagccctcgtcgggctcccagtcggccatgccgtacgttcggagcttcatccggatcgcgctcagcaggtcgccaagctcgcccttttcgcggacccaagcccgcttcgacgtcgtcttccagccctttagctcgccgctgagcgctcggacagaagggtacgtcgctggcagctgctgagccgaggttgaccatgcgtgcgactggctggcgagcgatccgagcaaggcaaaagcccgtcgctcgtagtcgttcttttgcgtcctgaggagaatgcacagcagttgtcagcacactgcggctgggaggcccctttcggttccgccgacggtcctcaccagatgccctgagccgtctcgagaaacttctctactcgacgctgaaccttatccttcttatctgtagggcaggcagcagtcagttaactccaacggccaaagcgccagcatcggcaggatcaccgaacgcactgagcttgctgaaggcgtggaaaaactctgcgacataggtcatgacgctccgctcgtcgggaggcgaggcctcagtcaggtcaccgacgtcaagcaggcgctgggagacggctcgaggaggtcagcgtcgagtcgtagcggacaagtacctctcgacgtcaacgacgcacaggaatgccgagatgctcctcggccagtcggaaagcgagctcggtgttgccttccctgtcgacctagccacgtcgagcagcatcgggggttagcatctttccctgattccaacgacatccatcgcctgactgaccttgtcgagcgcgtcgtagtcgatgaggtccggccggtgcgcgtgtatgagcgcacaaagtgccagcccgtctgtccagctccaagtaaactcgcggacgtcgacttctggccggtagctcgccgtcttgcgctgagcccagaggaggaggccgtccttggccgacagaccttcctctctgcagggaggggagcgagaatggtcagcgtgacctgctcatctagactgccgcctctcttcagacggagcgtgtggcggaagagacggacgagatgtctgcgatcgtaaaccggaggatgagggtccagatctgtcacgtcgcgccgtccgatcgtcagagcagcttcaaacgagcagcacaaaagtaacgcacgagcccgagtatgagcttgaggttgccgtcgatgatgtcttgtgcgagttccaggagatcgtcagctgaggccgagccgcgagagggagaagtcgccacatggacgagagtgcgcaccttctgcagcgatgttggtcaagtgcacaccccgctccttgatgaagcgaagggcgagcgtgacgttctggccggcgcaaggggggggggagggagcgacattcagcgccagtgcttcgaggggttcgcgcggagtgagagaaccggcgcacctctgccttctgaacgcgtatcctcgggttggcgttgtatcggccgagcgaggtgtcgcccatgatctcctggtcgtgcgagcgacgagaagggcaaaagatcgtcagtgtgagtctgctcgaggtctgaattgcgcgcagcagcgactgcagttgcagtgccgaggaagagaggggacaaaccatgagctgcatcacgcaacgaggacgatagtcaccgcaagtcgcgaacgaaggagtaaagcatcagcccaccctgtacaaggaagctggggagaggcagtggcaagagcgacgggccgacctggatgagtctgacgccgtcgctcaggtcgcgcgcgagcgactgcatcggcggcagctggcggctttcgagcttcgagttgagcctgtcgcacacagagcagcatggatgggaatttcaggcagagtcagttttgcccgatgctgatggaatagaaagcagtgaggcgagtggctgggacgacgcggtgacgagcgtccgccctcctgtgcgacaagggctgcgccgagctcctgcgactcagcccgatcttgcaagaagcacgcaccatttgcagaaggtcctgtgttgacaagtgagcaggggcacacgtcaagagagcgcgaagagcaaataatcaagagcaggtattagtggcaggcgagcgagaagtcgagcacgagagagggagagcgaaggggcatagggcagcctgcgcataagctgctgccggctccttcttgcacccgctcgccccgctgctgatacaatacggactttgcctggacgtcctcgagcgaggagcgggacgagaccatctaggcgtggggcaggcgtgagaggaaagcagcagcgagggcaggagaagggtcgttgttggccgacaccccgcgcctccctcctacgacgcgccctgacgcggctgacttcgcgcgtttgcagcatcggcagtcggttcgacgccacatcgagaggatcctcacggccagaggagcgcacaggtctttttcagtagcagcctctcgtcaccgcctgcgtgcaggctttttcgacaagatcattcaacacccctcgcgcgcacatctcacgcgccaaactgactccggagcagcatgacactcctcctttgctcttccggcagcgccccaatctgggcggccgtcatcccgaggacctgggcgagcatcgcctgctggtcgggcgggagggcagcgagcgccgggttcatggcgggcgccgatgccggggccgtaaacggagggggagcttgctgtggtggaggtggccgagcgccgccggctggaggatagcttgctgagggcccgtttgtcgtcactggagggggtggcacaccacctcggggtcctaccggggggccgctggcttgagcaggcgcgggcggctgctgaccgtagaaccgtccgccagcgggaggagcgccagcggcaaccgcgccgccatacgagcccgaggccgccgctgtcggtgctgtcggcggggccgcaggagcagcgcccgggttggtcatgcgcgagataacggccgggtcgacgaggtccatcatgagcatgctttgaaagagggcgtacgccaactgcggctgggccgtcagaagatgtcttgcctccatcggcgagctcgcaatcaagcccttcattcggccgagaacctcctcaagctggccggcagggatggccgcgagcgtctgcgtgatggcgtcaatcggccggacgccgcggtcgggctcgcgacctctgggcgggtgcgtcaggagcgtcctggggtcgtcggccgtcccgcctggaggaacgttggagccggagggaggcaagtcggcttgctggaaggtgatggtcagtgcgcgattgaagggcgcgggcaggggtcggccagagaggttgcgaacagccgaggcggccgtttcagagtctgtagccggttgggaaagcagtacgtcaggttggagagaacgctcatggcaagtcgcagctggggggagtcgaagaccgaccaaagtagtcgacgaagccaaagcctttcgcccggccagaatcggcgtggaaggcaaggctgtagaggcggggaaagcgtcagcctacatgcgccgctgctagacggcgacggcgacggcaggagcgaaggaacgctgaggcaaccaacagcaaaggcgtttggcaacgcagtggccctcctactatggatgccatgctctcgtcaagatgattaccaaagcagctctccagacgccgccgccccctccgccacttcgacgacgtcggcattgcgccggatccgccgccgctgttgagcgcccttccgctaaccccgagcgaaccgaaagggacgtaccgcgtctgctgaaccggcccaacctcggacatgacgtgcgtcaattgctcctcggtcatctcactgcaagcgacacgaggcggcacaagcggcgggcgtcagcagggcacgcgtcggcgtgctgcgagccgggagcggcgagtcgcggatctttgagggagatggaagagcccagctgggagcgcgttggctcaagagcgggctcctgctcgaccgcagcttaagtataggcttcaggagcagatgccgcccgacatccacagcagcctccctggctgcagcgatcagaacaacgttcgtgaacccttccgggcgggtgcgaggtcgcgcaacgaggctctctctgtctgctgagacggcagaaggcggagcagccgcctgctttgcgcgacatcgagcacgccgctcttcatgctggagtctgcaggctggcgttgctacgcaccgagctcgagctcgtgccgggctccagagaggacggacgcactaggggatattggagactgaggaagggggtgcgagatggtcagctgctgccaaaggggagactcgcaattcgggccgcaccatagacgccacgcgagttggcacgagcgttgggtgccattcttggaggaggtcgacgatgggagtcgaggacgaggtcctggtcgaggaggcatggcgtgaacctgccgttgtgcggtcggccctgccggcgacgcggttggccctccctccttgcctggctcgcctcgccctgtctggcgacccgaccttgacctcgtcccaagaatacacagcacagcacactacactgcgaaaccatgccgccgtccggcctgcggctcctccgccagctgctctacctggccgtcccgatccttgtcgtccgctacctcttcttctcgccctcggacgagcaggcgtcggccgccggaaagacgacggcctcgcagctgctcgcctcgcgcaacgccaacaagggcgccggcatccaaggccacggcgtcattgaccggctgagggccgacaagggctcgctcgacgtccatcggttcccgttcctccagagccgcatgggcagggatgaccggcccgacctgtttgacgcccagatcgcgctcggcgtcgcagattactgggatcgcttcagtaagccctggatcaccggccatgaaacggcccacctcgacgcccaggtcgtccgcggcgcgatcgacgagctcctcagctttaacggctgggtgactgtgagtcttgactgacggcaggaagcgaggaggctaaggcggcggaaggagctgacctggctcgaccggctcgaccgacccactgctttaggccgcctgccccacgctctcgcgcccattcggccagaacaagcgcgacgaccactacgaggacctcgtcaagggcggccacctctactatatcgccatcgtcgtccactcggccgaccatttcctcgtcgaccagctcgccgtcatcgtccagctctcgaagcggtccgtcctctgccacaactcctcgccctcactctcccggctgatagtagctgattatctttgcgggggcagactcggctaccgcaatctcttcgtctcgatccttgacgtcgcctcgaccgactcgacgccgacgctcgccgacctttgcgaggccgtcctcacgatcctcggtcttgcctttcagatccgccgcgtaccctcaatgacggtcgacccgtcggccgcctattacccgctcgaggaggcgaccgcgcgcaacctcgcgctcggcccgctctttgagcttgaggagaagcgcgggatccgcttccaccgcgtcatctggctcaagggattcacttgcccgaccgacgtgctcgagagcctgcgcgtcagcagggcaaacgaggccggcctcgtctgcggcatggactgggccgagcacaacggcttcttcatcttctcggaccggtccgtccccccactctgtctgtgctcgttcgcaacccctcgactgacctgcttaatcctccacgcgtcgcaggtggcgcacgcgtgacatcgagggcaaccttttccggcaggccaagagtaacgccaagactgaggcgtgcgtctggctcacttgcaccctcgttgcgacgcctgatctaacgttctttctcccgacgcagcggccctccgcgcgacaaggccggcacacaaaagtacggcctgcacctgcccttccagacgttctgctgcgagtcgggctcgcacgttgtcgacccttaccagtcgtactataagggcatcgtctaccgcgcgtccgaagtcgcccagaacctctcgacctcaacggggaccgtccccgactggaaccccgagacgcagtgcatggactcgacccagatgtggttttgccgcgacctgtggacggacgccgcgcgcggcgggcttaaaggccaggggcttggccggggcgcgtttggccagcaggagatggacgacgaggaggaccggctgatgggcggcaacggcggggcggcgtttggcaaggccgccggccgcaagggcaaggttgtcgcgaagcgcggcgtcgacgagtttgtcgaccaccagcagcaggaggccgataagcgggctgctgccgctgtcgtcgccgacgacgaggacgaggccgaggctgaagacgaagacaacgtcatcaaagccgcgccagtcggcaaggccgctgccaagaacaagcagccggcggcggcggctcctgccgagaaggcggttaaggctgctggcggcaaggctgccggtgcgaaggccgtcaaagctgctcctgccgcagccgaggtggacgaggacgaggtcgacgagatcgagatcgaggacgaggacgaggatgccgacgcggccgagggtgcgccgatcctcgtcccggtgaagattgccgaggtcgagcccgaccttccgacggacgacgaagtcaagaaggacttcctcaagcagcccaagccaaaggacaccgacgaccgccagacggggtccgacgccgacgcgatggtcgagggggaggacgacgacgagagcctgctcgacgaggtcccctccggccgcgctggttccggcgccggctcgatccccggccggccggccgagttcctcatcccaaacagcgcgttcaagccggcccggattgtcgtcaacccgcggtgtgtgacgacgtacggcggcgtctcgcacgccgtcctcgcccaagacctcttcggaaaggccgcgcatgagtggagccgtgacgagggcgacgacgacgacgagcacatcgagcgctacgccatttctgagtggctcggcccgccagactcgtttgtctgccaggagatgcggacgaccggcggacgggttgcgccgaaggtaaggctcccgcttcccgtatcgtctccgttccttgctgccgttccttgctgaacgcctcttgtcccgaccagtcgcaacgccgcgtcggcttcctgctgtcttccgtgcgcactctagatccccctgctctcagcttgcatcttgctgactcccttccgcttttactccatccaccaggaggtcggcctcgaatgaagagccgccagtcgacaaaagggcgctccaggccctcctccggcgggacgctgtcttgcgcatcgccatctcaattcatcatacagtacactcgctctccgctctatctctggcatggtccgcttcagatcagggagattccatctgtgtgtgatggcagcgaggtggataatggctggctcgagagcgtcgcttcagccgattggcgcatccgtcccacatatcgccgctcgcatgctcgacccgtccgtcccacagtcgcaacccagtgcagatccgagcgcatgtaatctcctcctctccgagggacgcatcatcccctcgctaggggcatcccgtccccttcctcggtcggcgtggtcggccatcggtaggctcagtcgaacgcctgcagtcccgtcgtctttgttccccctttcctcgcacaaggacgtttttacttcttggcagcgaggagcgcagcctcctcggcggcctccttgaggctagacgtagcgaaagggagcagggaacgaaggttagggcgtgttcctcatcgatggacctcccctcggaagcagggtggtcctcctttatgaccgccgactgcgaaagggagaacaaaagaacgtacacagtctcgtggtgaccctcctttgagcacaggtaggcgtaccgaccgttggcccaggtgaagagcgcgtagcctggcggaccgggcgagcgagagggcgcagcggggcgggaggaacgggcagcgtggcgtgggaggggggcagcggatggcaggaagggttagctgattggaatctcgcggcagcagggactactccagcgagagcagcaagcccgagccgagagctgctcgaatacagcctgagcactgcccaacagcgacgagaaagaagacgcaccggcagccaccggcgggccaaagtagatcgagttgagggcgatgcgcttgatgccaaagtagacgtactgctggacggcgccccgcatcggcgactgggcgttagacgagagggctggaaaaggcggagaggggaaggtgggcggttcaggatctggcgcggttggcggtcgctgggagccgagactgggtgtcggtcggcacatcgtcgtcccgtcctccgcccgccgaaccatcgtgcgggcctggagagagacggcgaagagcccagggaggggtcgggtcgggacgcactgtaggtcgtgatcttctgcttctcgccgccgaaggctccccaccatccgagctgaagggtcgtcgcaagcagcgcgcacgcgtcagtcaggccgacccttcgtttgggccctctggagctggcctcaaaggagcgcgcatagaaggtcggggattgggctacgcacgaacttcttgcctgcagacaaaggagagagcgagcgaggcaagccgtcagctcagcacgaggacgagctcgtggccaatcgcctcgatcgggaagaggcggcggttggccctctcgtcgacgacacaagacgcaccctgaggcatgccggcaaacgacggcggcgacgcgcggaactggaagggcgaggtcggctgcatcgtgaacaagagggagaacgaggaagaaggtcgggaggtcgagagggtcagggtaagctcgactcgagctgggcgccggggctggcggagcggacggcgcgccgggcgaccggcgaccgataggcgaaagcctcggacactccagccttttcaaaaacacggtcctcgccttgctcgctcgctcgctcgtctctgtcaactcatcaaaagcgtcatgggttccagaggggcgtcgttcatcgcatcgccggcccagcgacactactcgccgctggcgacttgaagttgtcgagcatccgccagaactgggcgagcagagccgtatccatgtgccgcttggccgggtcaatctgccgcacgcgtgtgagagcgggtcagcaacgggcggcgagaaagagagaagacggggaagggaggggacaggacggacttgtaggttgacgacattccagtctttgatcgtgggtgccggggcggcgttcgcccagtgaaagtagatgcccttaactgcgagcggtcagggctgtctgagtcagccgtgctcttcagcactcggagacgacgggagacgaaccgtggtgaaacagctgcttcgggtccgaccacttatattgcgaaaactgccaggcctggccagtcgtgatgatggcgacgacccggttcctgccaaaatcaatcgtccatctgtctgtcagtctcctgcaaaaatcggcgtccgagcaagtgcaggtcgagcggagcgacgcaccacacctcgtcccggttgccgagcttagcaagtgcttccggaccctcgacgacgaggtacttgatcttcttgtcgtctacgacggttggggccaggcggagcaaagcaatgaaacgtcagcgccgtactgcgctctcatgacaagggcagcccttggatacgcaccccggccggtccgcagtgcaacgacgaggtcttcggccttgacgatgccctcctcgtttgcgcgccgcttggcctcctgcgttgactcaaatctagccacgtcgtcgagacacgtcgtcagccgggccgctctggagcaagaaggtggcgaagcaggagggacgtacacgccgtcctcgaggaagcgcttgatgttccacattgtgaggagcgacgttggcgagctcgggacgatgatgatcgggtgttgctggcctgcaaaggcgtagcgaggtctcgtcagtcccgaagcaaggggcgatggaccgcgacacaaccagaacgcacgctgcttcttgacgcccagaacgaccggcgcaccgcccgcgctccccatcgcaggcgccgccccgcgctgggccgccgtccgactgctgctgcttgacaaagccgccccgccgctgccgcctttcatcgccgccgcgagcggcttgatcttgtctgcaaagactgtcttgtagatgtatgagaagtcctttttcgacgcgagcgacgacgagcccgtggcggaggaggaggaagagacgtctttggacgtccatgagcttgaggtgagcgtcgtcgagcgcagcggcgccgagcggtcgatccagctgaactcgcccgcgtggatctggaggcgagccagccagcccggtcagtcccccttttgacagcagcagattgagagcccgttcagcgaggttcagtcacctttgcgacggcctcgacgtcggccttgtcgacctgatatttgcgcttgccgttagcgccggcgaccgccccgccagaactgcctgcgcccgtcagcggcgtcgtcgtcgacgcgctcccactttccgccggcgggactaacacaaagcaaacaggcccaagatcagccgaggaagctcatagtagacgccagcgctggccgctcgcgccgacgacgacgggcgggcacggccgagcgacgacgcaccttccggaccctcgcccttgagccagtcaattaccggcttgcgcttcacggtcgggacaaatgcaacgccatttgcacgtgcctcgcgtaggtagtcttggagcgtgccgtcgcgcgtctgccagacgatgtagaggatcgggaggttgattgacgatgggtgggagtcgagcgggacgctgtgagggagagcagaacggacatgggtgcgtgagctcctgccaaccgtccgccacaagctagtaagcgagtctcaggaggggagaggaaggacagacgtcgcaaaggccccgaccttgtcgagcgtgacgtccggcccgaggtggatcttggctgcctggaccatctttggaacctcgacgccggcggcgtccgtcaaggtgatgggcgtctgagcgaggagcgcctgccggaactggacggcgggcgtcgacatcgcagtgccgaggattttgacggccaggctggagtgagttggctgaaagactggagtgagggccgaggacgctgttggtaatgaaggttgctacgagctgggaggggatggcggtcgagggcgggcgggcaggcgggttggcggcgcgtgaggccgcgtgagggtgagggcgcgttcgagaattgtgattcaacaatcatagttcatgatgatccatctcgagtcgagcgaggttctgctgcgagtcggtttaatgattcagaccatcgccatcataaaaggccgtcggctgacgtgcaagcgcgcctgcccgcctcctcacccaggacgacgaccgcctcggctccatccacacgatcttacagcaccgtcgacgcccttgctcgacaaaacgactcgcgggtcagcgaccagccaagcagccgagctctagctcgcgtgatgctctcccgcatggcgacccgaccatcagcgcagcagaacgcttgaggcgggcccccgacccgaactccttttgtccgacccgccagggggagacagctctgcggacgcggtgggtgacggccgggctgacgaccagcgactgaccctgctgtcctcctttgtcccaagctgcaagctgatgagcgtcctcctgttgttggtgtcattcgggaggggtgctcggccgaccacctccgctgctgacctcctctctctcagccctcctcctctcgctcggcccgaggaggagcttgttgacaaagcgtacaggggccgaccgagatgaggacagctgaaaagccggctcaggccaggaggaaggccggctctctctctcgtcctccttcctcacccaccatcacctcgtctcgacccgctcaagattcgcccagcatgagcctccctacgacctccaagatctgggtctgcgccaagaagcctactgccgagatcactcctgaggtgggtgcttctgaactggctgagctgccgcagctcggctgaggccgactcaaagctgacctcgctgcccttctccctcgacagacctttgtgctcgaggagcgcccgatccctgagctgaaggacggcgagatccttgtcaagactgagtacttcagcgtacgtcagcgaggtcatgagcggcttcctctcgacgccagctgactgccctcctcctttctcgcagaacgaccctgcccaacgtagtgagttctcctatcctctcgcccgtcaccgacgtacgtcgcttacgctctagccccctcgcagcctggatccagaagggcctcgaccccgctcgcgcctacggaccctacatcgaggagggcgagccgatgccctcgatcgtcctcggccgagtcatcgcctccaagtcgccgcgcttcgaggtcggctcgcgcgcccaggccttctcgtcatggcaggagttcccagtcttcaaggacgccgaggcgcagcagatcgagtccgtccctcgcttgctgtctctcatctatcctgatcagccgacactgaccgggcttttgttccagggacattgagggcttctcgccgtctgtcggcatcagcctgcttggcgtcccgactttgactgccctcgccggcctgacggacgtcggtaacgtcaaggcttcggacgtcatcgtcgtctctggagccgctggcgcgaccggcagcagcgtcgtacaggtctgcccctgggcgttcctcctccgccgacttacggcgcgacttgctgacgcccccctccttatgcgggtacagatcgccaagaacgtcatcggctgcaagaaggtcatcggcatcgccggcggcaccgacaagtgcaagtgggtcgagtcgctcggtgcggacctctgcatcgactaccgctcgccgacgttcgaggccgagctcgccaaggcgacgggggacggcgtctctgtctattgggacaagtcggtcccttgcgatcacttcgttcttcgtctgagtcctgaccgcctgcctcttacatattcgacagcgtcggtggtccgatcctcaacaccatgctctcaaagctttcgcgccacagccaggtcatcgcctgcggcgccatctcgagtaagtgccatctccaatccgaagacgggtcggaccccgctgaccttcgcccctcctgctccggcagcctacaacgagcccggcgtcggccagctcagcaacttcttcgaggtcatccagatgcggatcactgttaaggggttcgttcctctgctcgcctgtgtgagggacggcccggcctgaccctttgctcgccctcctccacagcttcatcattctcgactggatgaatcgcttccccgagttgacgaagcagttgacccgtgcgtctccttacactgccctctacgactacagttgaccaacctccatctgacccggcagagttcctcaaggacggcaaaatcaaggccgacgactacgaaaaggttgtcccgacccgctttgaggatgtcccgacgacttggcagatgctctttgtcggcgacggctcgtcgaagcaggggaagctcgtcactcagctcgtttaggagccctgcgctcgcagctgtatcatgccgcttttcgtgattctaggtgccgtcacttcgcgagttacgaaccagcagggcgtagaaaggtggagccccgtcccggctcccgaggccgcctctcgaacgcctctttagccctcgaccggctgtcatcgccatcctttcattatcactcactctctcaacagccatcccacgtacattcacgcagccgacctgcctgcttgcccttccacgtcccagcgacgcccaatgatcgtccggttacggcccacgactccctgaagcccaatcaccgacccccgacctcgcttcgagcctcatccacctagtctcacctagaccccgggctgccagcctccgtcgcagtgcgtcgcaccctcagctgagctcagagtcgaccttgaactgaccagaacttcctgcctgccgcaagtgtttggcgagaaccagtccgagtcagtccggctcccgtcgccgtgggagacgcccaagagcatccactcgcgtccgtcgctcctctccttcgaatgccagctcagaccactacttgccagctcggactgacttggcctcccttctgctcgcaggcaacggcactccagcatctgtctctagcgtggacatcatcggcagttcgctctctgacctctcactcttcgacacggacccgtcgagcgtcgacgacgcccggggacagctcgcctaccacctcgagcaaggcttggagagctctcccactgaggatggcgagctggagctctcggcccagcagatgcgaaggctcaactccgatatggctaaggcggcgtcgcccgcccgccggctcggcagcctgtcgcccgagagcgaccttcacggccaggttgagtacaaggtgcgtatgtgcgagaggcaagttcgctggacgtacaaggctgacaaatccccactcgccaatgcagctcaaactaacgaacgtctcgcaggatcgcttcaaccgtctgacgacgcagctgaagtggcgtctgctcgagggcggcggagagtcatactatgaactcggcgtgctcggtgagcgcactcgtctctagaggttcgctctttctgtggctgactgaagtgatgcgacttccagacgacggtacgctcgtcggtctcaggcgaagcgagctggttgcctcgctcaagacgcttgagcgcatggccgaagagctcggcgcgaccgtcctcgtcgtcaaggagatccggctgccgacgctgccgagcggccagctcgatgtcggcgattcggccggcagccgcaagcgctgggagcgcttccaggccggactcgagaagctcgtgtcggcgactggccaagacgtcgtcccggcgccggcacccaagtgggcgtcaccgggcgaccacagcggcgtcggcaagcggcgctatgtacgtgagaagaagtggcaggacgccattgccagccaaggcgggacgagctcgtcgatggcgacgacgtccgactcggcgtcgacacccggcgggacgcactccgagtcggccggcgacctcagctcagcctcgttcccgggcctgacggatgagctcacgccgttcacaaagtcgcagtcaaggtctgtcaaccgcaaaaagtatggctcgatcctcgacgacgcaccgataccggccggccaccgccctcacccgacgccgcctgccaagagcgacaagcccttccggcggccaaggaaaccgaaagagccggccgttcgtttcgagccagaggacgacacgggcggcatctttggcagcgttttcgacctcgacctttcggacccgtttgcgcccctgccgccggtcgagacgccgggcgtctcggccaagaagaagagggaggacgtcaaagcggccaagaagaaggtcaagaaggcgctcaaagccagtccgtcgctcctgcctgccgccggtgatgtcgacgacgacggctgggtcggccagagtctcgacgtctggggtgcagacggcccattatcctcggcggcggcgttcgacagcgatgtcgcacctctctcgctcgacgtcaccacccttcaatcggtcggctcgcaaaccggcgatgctgtcgagccgccttcatcaagccgtcaggcggagacgacctcgagctcgacgccccagttttcaagtgattcgctcacgccatcgccttcgccgctgctcgtgccgacgtaccggccgccgccgtcgctcctcccgcgcgctttccccgtccgggtcgaccacgggaccgcgatcgtcgctgtcgacgacgccctcgacgaggacgggaccgaacgcctctgcgtcgaggtcctcgtctgccgtaaggacatggagaaccacctcaaccttgaggactttggccgctgggacgtcgagacggtccttgccggcgatgatcttgacgagccctgacgttgatcgtcctggcgacgaccctggcggtcgcttacgctttctgtaaccttccccttccgtgtgaatcactccttctctccctcttgtacgcgtccctcgcgccccggccccggcctgctgttgatgttcccattgtgttgtcaagatcgcttggaatacagctgcaacgcatcagacggccgaacgctcggccttgccgtggaccagcggcaggtcgccgccttccgacggcagccgctggtcgtcggccaagcagtctggggcccaaacgacgatcagcacgccaacgttgatcgccatcggcagcgcgtcaaagacgtagaggcacgcgtccgagttggcgagccagcttttgtggccggcggcaaactcggcgacacggtagacgctccggacggcaatgcagaggcacgagaggccgatggcaaggtagagggcccgccagtgggcgaggcgcgcccaacgagactgctgccagggtacgacggcgtcccacttgccttgatgctgagggagtgaccgtctgtacaaaggtcgcaggctagcgtcagtctcagggggcatgcttgagaggttgggtcagacgtacaggcgtgtagcaaagaccatgtagatactgatgaagccagcaaagcagacggcctggagcgcaagtcctcccaacgcgacctggcaaaggcgtcacagagcgagtcaagagctgagacgagcactcggtcagaaggaagacgcaccttgttgccgattagagcgagacgggccgtcgacgcctggagacccgacccgccgagctgggcaagaaaggtcaagacgtcgagccagacaaacgtcttgacgatccacgtccgccgcatccagaggcagtcgtcggcggcgaggtggttcgagaggcgggggaggacggcatagtcgaacgcaagaaagaagcagggcgacgtgaggaggaactggtaataagcggatgcattgggcgtcagcgtgtagcgcgaacgacgctgcgcgagagggctggctacgcacgatctgctcgccgaggaacgaccaggcgttgatgtggttgcggcgcgaaaagcggagaatgtagccgagcgacatgaccgtcgtcccgatcggcagggcgagcgtccactttgcggtcttgcggcccgtcctgaagaagcctgtcgggggtgaggtactgatgagcggttacaggcgcaggcaaaggtcgaggggacaggaacacacggatccagagaaggatggcgaggacggcaaagatgatgcaggcaaccatcgacatggcgccgttgggatcgtagagcgcgctgtcggagggcgtggtgcgtcaggaggagctaaaccttccgactctcagccgtgcgaaagccagactcacactccgacttcgtacgcccgtccttcgagcttctggtgggagctcggacggctcgacatgtcgctcaaaggtgaggcggccggagggatggagaggaggctgggtaaggaggcggctggaggggggcgtcgacgagcttgctgctatcgtcggaggtttgagggaggtgaacaggcgaataagagagcttagggaggtacgtgatgttgtaggtgagtgagaaaaggcaccttgctgccccctcttcctttctcatatgtattcgaatcgacgggtgagctcgcagctcgccggccggccggcgaacgtcgcggcgagcagccggacgtcacccgagcgaggcgaagctccaagcgagatcgtgctgacggcgtagtagcggggcccagctgaggccctgctagaggctaagtggtcgtcggacggtcggcgaagggaggcggtcgacggctaacgcaagaggggcggcacggcgaacgccgccggccagtgttcgaccgcgcagcagccccgcccgccggcccttctgcactcctgacgcctccttctcaacgaaaccagagacaagtgaaggatgacatgagatcgtcggcgttttcatacaggcgcactaaggctacattcgtaaaggacagagagaaggaaggcgcgggcagaccgcgcctcaccagaggtctttcgcgacgccccagacggccgcgtccggcttggcctgctcgagctcggcaatctgcttcttgaggaggtcgatgcggaaggcacggtaggcttcctggaggcgcggaacgttggcctccttctggacgaccgagcgcgcagagtaggcacctgtcaggagaccggtgttggccccgacgaggaagctggcggcaaggaggcgttagcctttccttgtctaggtcgagggaggaggaagcggccagaacccacccgagcgtcgtgaagagcaagcccgagaggcccgttaggaccggcccgggctcgcggagctccatctcgagcgcctttttcgggatctgaacgtgctcgcccgactgcatgatgacctcctttggcttgggcgcggccttgagctgctggaacgcgcggtgcatgcgcatacggccgccgatagcgatgtacaatcctagtgcggccccgaggccggcaccgacgctgacgtgcgtgccgagcttctgcgaggccttcttgagggcttggctggaagtaggcaggtctcgggctggtcagcgtgacggcccatcagccagagcggcctcaagccgctggcatccagtcgattcgggagcagacgaatcagactcaccggtcagactcggcaaggtcctttgagaagtgagatccggcaagctcgaggtactcctgccgggcgcagagggagggcggaagggagggaggaaggtcgtcaggctggcttgatgacggacgcctgcgagacgacgaaccttctgctgctggttcatcttgtcggccattggtccgattggcatggtgggctggttgtagaagagatgagggtgctgatgctggtgctggtcgaggttgaggaaggcaggaggaagaggaggacgggcgtcgtcaggtcggcgtgcgacgtcatctcacgcgcagcagcacctcgccttgaatctgtttcgaccgagagggacaaaaaaaggaggcagcgcgagagaggttaaaggagagactgtaggcttctcgtcctgccagcccctcgaccgagatcaagcgatggagcgagagtctgtaaagggacctcgttctcagtcgccgccctcccactgagatcgcccttccctctgcccaccttgccattgaagcgctctgtagagccatgtatgacctctctcactagccttgatcatctgccacctgccaatgttgtcggaggctcacccccgtcttggccgcgggcgaaggccgaggacgcttcggccgttggcgagccccgaccgtcggcgcttcggcccgaagctccttcgagtcaaccgtcaaccccgttcgctcccgtcccttccgacgttcctcatcaacagcgactcactttgtatcgacacctgcacaagcgtctgaaactcaggtacggccttcgacctgcgctctgcgtctggtctgcgtctcgtctagacgggcgtctgccgctgccgccgccgtcgttgaggtcgagctcgactttcgccgccctgctcctgcatcctgctcccgtcgacctcttagactgatcagctgacggtcctgattgacccttaacaggtcacttcacatctcccccttccttcccagctccatccctctttgagtcatgacaatcccagctgctacgtccgagagcaactcgatgacggctcaggcccggccgcgcgtgccggccaaggacgccgtcgtctacgtcccgagccctctgcatccggtggtgcgtcccgattgtgctctcagccggattgaagacgaggactagccgagactgacccttgacgctctccttccatcgcttgggctgcgctggctctgcttctcttgctttctttgactcttccctcggcgcgacttacgctggacggctcggcaggcaaccgagctcgcgctgaagacgttcggcaaggtccttctccacaacacgccggctgaagaggccctcccagtctgcgacggcatcgtcctgcgtcaggtgcatcttgcggtcgccagcataagggccggaagagggcaaagtcgctgaccctccgtcgctcgcacgcactcagggctttgtgtcagccgagatgctcgcttctgcgcctcgatgcgctgccatcactcggaccggtgtcggctgggatactgtccccgccgaagcctgccgggagctcggcgtgcccgtctcgatcctgcccggttcgtccagtcgaggccaaggcggctcgagttactccgactctgacacgtacactcactcgtctcaggaatcaacgccgagacggtcgccgagctcacgctgacctttgcgctcgctctggtgcgacgcgtcaaggaggtcgacagccatctgacaaacggcaacatggtcaagtcgatcgactatgtcggtaagacgctgcatggcaaggtgcgcgcgcgtcaagagtggtcgcagaggtgcgagggagcggaagctgatcctttccgaccaacagacactcggccttgttggtatgggtgcaattgctcgagccgtcgccctgctcttctgggtcagtccggtctccgcaggcgtttgggcgcaggcgagaaactgacctttgcgctcgcatggcactccagaacgccttcaagacgcctctgcacgtctactcgccgacctcgcccaagtcacgctgggccgacattccgcacgtccgccacgactcgctcgacactttccttccggagctcgatatcctctcgctgcactgccccctgacggatgcgacgcgcaaccttatcggcgaggagcaactggcgagcatgaagtcttccgcctacctcatcaacgtcgcccggggcggagtcgtcgacgaacacgcgctcgagctagccctccggaacgaccgtctcgcgggcgcagccatcggtgcgtgcctttccttcatcgctcgtcggcgcctcggcttgacgctgacctccgccttggtcgccagacgtttgggaggtagaaccgctgactgactacaagaactacaagggactcctgacgaccgggaagaatgtcatctgcacgcctcacatgtgcgtcttggctcggcgcctcccggtccctcccccccccttccggcgtcggctgacaaaatcaaccttaatccacttatccacagcggctcatcgaccgaagagatgacgattaagtcgtgcgttgccggcgtgaccaacttgcaggtgtatctcgacggcggcgagctcaagggccgggtcatctagaggagtacggatgaaatgttatacggacaaatggcgaggagcaaagcccagggctatcaagaggaagagttcagcaccaagcgtatctgcggacgaacaggctcagtcgttagtcagccagcatgtgcgcatccaaagcgacgcagtaggacgtacttctggttgtagacgagctgcggcggatcgacctcggccggaccgtaccacgccagctgcgacagatgctcgtctgcaaaggaggtaaagttaggcagcgcgaccggtatgctctccagaagcgtgtcgctacgcacctcgagtgaaagggtttccttccggccagccctgagggatgggctcttcgccccagacctctacgcgggtcgcaccctctcgcgcggcggctgcctcgacaacagaccagggcactacgccaagcatcgcagtgatgagcagcgtcttgtcggccggtgacggccaggtgcccttgtacggtggcgcctcgtgcgaagggtagtagaagagcgcggaggaggtcgaggaagaagcgaggccaaacgaggtcggggtcgttggcgattgcgattctgggaacggcggtgagaggagcgcgcggtgggcgtggagcggtaggaggtccctggttcggcgagagggtagtcagttggagccaaaacgcaggctagagtcgtcgagacgcactgggccgccgagaagcccactcgcatgcggctgctgtcactgatatcgcctcgagcgacgctctcttgcatacccgcatcgagtgcgccctcgagcgccttgacgtcggcagccgtcgaaagccattcccagccgttcggtgcgctgacgtcttgttgcgatggcagcgcccactcgtgcccgaccgagccctgctcgatccagccgggccggtcctcgccgatcgtgcagcggcggtagaaggcctcgccgacgtcgctgtagaggaccgagaacaggccgtcacgagcggcatggcgatctggcagaacgggcagctcgccgaacgactctgggaagggagggagggcggaggcgggcgcgatgatgtctgttgggcagcagtgcgatgtcaggtcagtcggagtcgcccggtatactgactcgctgagcggactgcacagtgaaggatctggagcatccgcttgccgtagcctcgcttgcggaagcgttcaggcgtatagacggacgcgatgccaaaggcatagcaggaggtcggcgaggtcgtgcctgggttgtaagcaaatgccggccggcggtaggtctcgacgtgggacaaaatctcctccgggcccgcagaggagaagccggtcgcagggtcgacggtcgagcgcgggacgaagatcctggtgaggtaagagcgtcagatgggcccatgcgcaggtgcctcgctcggaaaggccagacgcaccacgtcgttagccggccgagcttggcccaggcctcgcgttccatgagctcatctcggcggagatagcttgcttcgtcggggaagcctcgagtcttgccccagtagtctgcaaggcgagcgggtcgagccaggatcgtcagcttggagcgggcgtgtcaggccggatgatcgggctccctcgggcgtactcaccaaaggtgttaagtctggtttgacggacctgctcgggctgcgccacggcaagggtgaggtctgatagggcgtaggtcatgctggagcgggggacaagacgagcgagatggtggtaggggggccgatgcaggtcgagtcaggcgcgaggcgtcggtcagggccacccgtccgttaaggctgattgatcctctggccggaatctgcctccttccacttctcagacatttgtcttaaagtaacatcagatcaacgaggtgagcgctgctgatcacccattgttctgtacatgtcgatgctgaaggagagcagcggcaagcgggccggacacgcgacctgtcggcgttcgccgcgcagtcggctcagccctcgccgcagttgcgtgcattatacaagcccggcctgcctggacctccgggcgacgctcacggagtgttggcaagatggaggcagagtaagtaggcggtggtagcggtggtgacgagcgttgacactcgagctcgagccagagtgcgaggaccggcttgccctctccgaggtcaatctcgccgtgcagcccgcggacaagggccgccagctcgggcgaggtaaggattgtccgcagggacgcgtgttggcccggccaaagagctcctgagacatctgttgtggcgggccgtctcgtatcggaccgcccatctcaatgtcgttgagaacgacgtaccggtagaacagtggggttgccagagcctgcgacggaagccactcgttcagccggcgccccaacagagaccacttcgcatgcagacgtacgtgccagagcttgccgagacgcacatgttctcggccaagtttgctttcatgtcctttctttgtcgctgtcacctgccaagactttgcgcttccctctccttccgtaagccatcctgcatctgcgtcctgtgcaagatgagtgtgtaatggcatagcacgaccctccacgtgggtctagacgagcttgagcgcgcccaggtcgaggccggtcgtcggctcgcctgccgagccgacgccgcctgcgctctggccgcctaagaatgccagcgtcgacgaaggagactctcctcccgagcttgccgccgccgccgccgccgtcgtcgtcgtcgtcgtcgtcgcgggcgtctttggctgcatcccaccggcagcctgcgtcccgagcagctggccaagcactagcggcacctcctccccgtctaggtcatagcccttcccaagcatctccctcctcagatcgacctcctcgcccttctccaccccaaggaccgggtcgtcgaggatcagcttgaaacgcaagacgtggaaggcagaggtcgcgttgggccggatcgaggtgaagtagacgcggcccgagttgcgcgagccgcggaggcggaaggagaggtcggcgcggcctttgaggacggagatctaggagggcgaggtgaggggggaggggatgtcaggcgtggaggatgaggtgcgacaactgaccaggcagagtacggaccgagcccgaaaccctggcgagcggcggacggcggaggacggagcatggaggagcgagacgccagtcacagtcagcacgtcacgagtcaagaggcctcgacatcatgcgcctcgagcgtccaaagtgcgcaggacgcaccacggctcgccgccggtccaccacgtcttttcaaggacgacagcctcgccgagcgtctcgtcgacgagggccgacgtccgcatgacaaacatgacctgcctgaagacggacgacgacgacttttcgccgttggtgacaaaggcaaggaagccggcccaggagagggcaccgagggtgacggtcgcgatgacggctttgaggtaagactggagagtgagaggggaaaagaggtcagcaagtgggcagatcaatgagagcaggcgcgagccaccgatttcgggaacacggctcggccaagaagaggcagacgagcagcaagggacgacgcattagcgagcccgtcgcaggaggacgtacgtgcgggttgggcagttcggtcgggctcggctcggtcggcaacctccttgcgtgacccttgcccttgaccgcaccccggacgcgcgcctcggcgatcgcctcgaactcggtcgggttcgaggttgttgggatgtggcctccggaggaggggaggcggtacgtcgacgacgaggaggttgctgctgctgctgctgcgggtccgggttggttggaggaggaggaagaggcgatggtcgatgctggccggcgggcaaccggcgcgaggcgggaggcaggggccggaccgagtgtccggacgagagcgggtagcgtgcgcgaggacgacatggtgctgatcggaggcggtcgatggtcgtcaggggtcgagcgaaggcggagtcgcctgcgcgcgctcggatagatgaattcatagatgattcttctggcgagtttcgaaggcgggctccttgtcccctccggccgcgcagagcactctcgtccagcccggcatactcaaccctcttccctcccaagcagctcagtccgtctctccagcactcggtccgaaacagtcactctagctcgtccgctatggtccgtcctacctcttctcttctgcagtgagcgccggcgcgtggtcgatttctcgacctcatccctccggccggccgtggccgagctctctccgccgtgctgctcgaacgctgaccgtcttgcttctcttgtcctctagcgtcctatccttctgtctggtgcgtctcctacagtcacgagcggccaaggctcgcaccttgcagtaaaccgcgtcgagccctccgtcgctgaccccgttgctgcaccccctcctccgacgattgcaggccacgagcgctcgctcacccagatcgtttacaacgccgatggcgacctcctcttctcgtgctccaaggacaatgagattaacgtctggtccgtcacccgtggccatcctgcccctcgtatcgcgcttgatggtctggccgctgaccggtagcctgcttgtgtgcgcgcttctgtgctcctaggttctcgcacaatggcgagcggctcgggacatatgtcggccacaacggcacgatctggtccgtctcggtcgactgtacgtcctcacacctccacgcttttcgtgtcctgctctggcaaggggggccgagagctgacctagtatgcttctgcgttcgttcgcccctcgcagccaagtccgagtttctgctctcgggctcggccgacaacacgatgaagctctggagtgtccagacgggcaagtgcctctacacgtgggagttcccgaccgccgtcaagcgcgtcgcgtggaagtacgtgttgtacctctcaactctcaccgaccgaaggtcgttcaatctgcctcggttgggggctgaccttggtgctctttcgtcggcgacttgcagcgaggacgactcggtctttctcagcattactgagcagcggagtggtttccagggcgcggtccgcgtgcaccgcctgaaccgcgaggagccgacaaaacgtgcgacctcactctttcctcgctcagcgcttgcttcccagggccgaggtgtgctgactgccctcccccctcgggtttgcgctcgcgcagagagcgaggcgcccgagaccgagttcaacccgattggctccaaggcgatggtcgccgtctttgcgcccctctcggccctcattatcaccggccacgagtctggcaaggttgccctgttcgacagcaagacgggtgacgagattcagtccaacgaaaaggcccacaacggccaggtgacggaccttcagctgtcggcggacgggacatactttgtcacgagctcaaaggacaagagtgcgcggcttcatcggaccgaggacctcgttgtcctcaagacttttacgaccaacacgcccctcaactcggcctcgatcacgcccctccggccttacgtgcgtcgtcgtgcctgatgcggtccacccttgtttctcaggactgatggatatcccctttcgcatccctccaggtcatccttggcggcggccaggacgccgcgtcggtaacgaccacctcgcagcggcagggcaagtttgaggctcgcttctggcacaaggtctttgaggaggaggtcggccgcgtccgcggccatttcggaccgctcaacacggtcgccgtacacccgagcggaaaggcatttgcctcgggcggcgaggacggttacatccggctgcactgggtgcgctttctgcttttgcctcgctcgctctcacctcgcgtctgctccaggctgaccttccgttctgatcttcagttcgacgagtcgtacttccgcagtcgaccgttcggcgacctcgagcccgaggacgactaaacgccccagtctcgcaacctcgacggtgcgcgcgcgagcgacggccgactgctctctgtcactcccatgcgttggcgggtgtggtggcgagcggggcgatttagatgtggaggcggaggagatgacgacgtgacggcggggcaggagggggtgtggtcaccaaccccttgcgagaccttgacaacaccctaaaatgaggcttttctctctgctggcttggcttcatttgaagggcgcacacgaggagagagcgtgtgccgtcgcgtatgggctagaggtcgaggaaagggcaagcccttggctgtcgttcttgaggcctcgtcggcgaacgcccgatcttcccatacagcgtgcgcctcgacgcaagcaaatgagggccgcaagtaagtatgtcgaccagccgagcgatgacggtctccgataagcacggctcagactggatcgagcggcagatggtctacatggatcaggagacgggcgctctctacttccgcctcgagtgcatccgcttgctcttgccctccctctgcccaccgccccctgcgctcgccgcacctccccgtgatccctcacttcacctccactccctcctctccccctcctcctcccctcccgctggcggcccccaagcgaacgtcggcggtggcgcccctgcctcacaggcatacacctcgttcgacgccgcagacctctgggcggtcgcgccgtggctgcgcgaggaggttgcgggcgagggcaagggcgtcaaagggtcgagagtatggggcggcgtcgggttcctacgcgaggagggcgtgcctgcgtaagggagggcggacaagagtgcaggcaagtgcgatgcgctacaggttcgatcgaccgtctgctctgctctggacaaagttatcttttttcacggcaaggccggaaagcgcagaagtaattacaatgccatcctcctgcctcaacgtttgctgccgttctcgctacccgctggcgccttccgcacacggaccggccctccagcgggcgcactcgtccttgccgccgtcggcggggctttcgatcggccagctacggctgctgctgctgctgctgccgcgcgcgtcggccgagcggtcgagacggacgctttcgaggtgccgctcgtggtcgtcgtcggtcgcgccgccgccgccgccgccgccgccgccgtccgcgtcttagcgggtgccttgagaccagacgatgcgccttcgtccgccgtcgtgccaggcgctgctgctgcctgccgccggcggagcggagcagcgaccgcaacggccgttgctgattcgcctgtccgacttcgtctgaccggcctgccttgacggctccgccccggcggcggcgacggccccggcgccggcggcaagtcaggcgtcgtcgtcctcagcctaggcaagtccgccgagccggcagattcggccttgaccacatcgacggcagcagcagcaagctcagcctcctcaagctcgacgacgaccgtcctgctctggatccggcgcttgccctcggcgaggtcgagcgcgtcgagctcgtcattctcgacgacagggacgtactcccagcggtcgctgaccttgcgccgcttggcactcccttcgccggcgctgctgggaggacggacgggactgaccgacggcgagggcggcgacagctgtgcttgctgctgctgcttctgcttggcccgccgagcaggggtcgcacgcgtcgcccgcgtcgagggctgacgggcacttcgcggggtcggcttcactttgggtgccgcctcctcagacgaggacgtcgaccgcaggctggtgagcgtcgaggtgtcgagagactcgccgccgtcgagctcggccgtcgtcggtccggagcgggtcgactggaggaacgagcccgggggcgcgggcgtggccgggaacgaggctcgcggcaagcgacggctctcgaacgccaggcgcgagggcgagactccgatgatcggtcggttttcggcaggctggtggagaggccgagcgtctgtttgttgcaacggcggctcgagggcgacgctgagtggcgaaggcgaggttgccgcgggtgttgggtcgctggctcctcttgcgaaggtgggagcgccagtggtagggctgactgggagcgaaagatagattgactctgtcgattgttgctcgacgactcctgccggcggccgaaagagatgtcgtcgacttaacgttggctcgtcaggagttgagctctggccaataacgacgagatcaacgggggaaggcggcgaaggatcgagagggaggagaaagtcgtccgccgagactttggatggaggagggctcaacggccgttgcggtgggggtcgactaacgatggcagctggcctcttcgaggaggccttgcgggcaagcgggccaggggctggaaccccaacccgtccgctgatggctgctgccgtgcccggccgagggagacgggccggctcggcactgggggagcgggcttcgccgggcgccaatgggcgtagcagcgagccggcggagggcttggagggccgcttgcttgcggtcgccggctgagccgaggctgctcgtctgactggagctgctgctgctgctgtaacctcgggccgcttggtcggcttgctagcgagagatgtcgaagacggtcctgcgacggcgtttggtcggaactcggcgtggcgtggcggttggccgtcgttgccgcctgaccggacgagcggccgcggctcgcgctgcaggcgctggatctcctcatagacccccctggcctgagtcacgacctctcgtgcccggctctcttcggaccgaaccgcctccttgctgacttcgagaagagcagcggtggaccgtggctttggcggagggccagaccagcgcgagcgcgccttgtgagcggcagcagcaacgaggtcacttgccggtcggagcgtgatcgacacgacggcctcgaatatgacaaagatgagtgagaagacgagctcgagcggccgatcgtatgtcgccagcagcggccggagcaggtggcggtagacaaagtcggagccctggcggggcgggatgcgcagttgaatgacgggtcggggtcagctcggccggggtgccaggacgcgcaagggcacgcacgccagtcctcgaggcgagcatccaaagcaggataccgagcttgatctcgtcgtataatgggatgagaaaataggccgtccggtcggtgatggcctcgacctgctggaatgccgtctgctcacacgcaggacgacgcgtcagaaggatcggtcagcccgcccgccccccttcggcagcttcacacctcggacgactgcgtgccgagctcggcctaacgcacccagacgacgtagagcccgacctggagctcgacctcgcgcctccgctcgcggacgcccctcgcagggacgcccttacgcgcccgcgaggccggcttgaggaccttgaaggccgaccagacgttgagcgcgccgctgccgtcaggcccgagctcgggacgttagtcgaggggagattaaggctggagatgaggacgaagggaacgtacacgacgtgccagacgaggttgggcaggagctgcatcgactggggttgccgccagctgggagatcagggatgagcgacgagggtgatcaaggcacgggaggcacgcgcagccctcgcctccctgtcccccttgaccccgaccagccagaaagggggacagctcgggctctgacaggagcagctcacctgatgactgaccccttctcctccgaccacgacctgctggccagcgtcgaccctttacatattcgccccgccctcgcacccgccgctcgacccgcctcgtattaggtgcggctccgcgcgacgcctctcgaccgccgccgccgcccagacaaggcctggccccctcttgatcctccctctgcatcagatctgaatatctgctagacccgtcacctcgctcgcctacctgccaagaagcctggcgatgaagggccgccggcacggtgggccgccctcgcctctgctgctcacgtcgcccctcacttcgtgcgtccttcgagctcctacagcatcgagccttccctccttcctgcgttctgctggctgcgggtcgatctcagcgctcacactctcctcctttgggctgcagaagcccgccctctcgggagcacgagaagcacccgttgcccgctgcgcccgaagccgcctacgcgcccgtccattcaacccgcggccgctcctactcgaccacgtctctgacgtcgtcggctcaacgacccggtcaaaccggaggcacctcgccggccgaggaacgtgtccggctcgagatgttcgtgagcaggccagcctcgaaaggtggatgggcggacactcttcagaagccggccgagggacgcgttctcgtccgtgcgggcgagggtggcttctagcagtcaagctccctctggcgggggcacgagcatgacatgtcatgcgcactttgcgcctcggatcatcgcaagcgagggagcagtctgccggcggcggttgagcaagagggcagggcgacgggtgctgcgctgcgcattcgcctctcgctccgagcctcgacgcgtcctctcccccttctcgaacctcgacccgaccctcttctctcccccttccatcgactcttgctaaacggatgtttccctcgccgacaaagcggaacctgaccgagtcgaaccacgccgagcgggtcgcctgctggtcgccctcgcgggctgacctcgacgacgagacgacgaacaagctgtgcgtcgcctcgcctcgcccgtcaagactgccgtctgccctagccgagcctgcccgacctctgccccctaggaaggcccttgcagcgcttgcctaaggctgacctgcgctctctctcgcctcttcagagctaacattggccgccgagcgaggcaaagtgcgtcccatcgccctcgccgccgcccctccccgccgcgcttcccgtcgcgtcccgccgctgacaagagctcatcacgcaccgccttacctccctgcctcactcgccccaggcgtcaccgagggctacaagtcgccctccttctcgcccgtaaagtacggcggcggcgactcgtactttggcggcggcagcgcaggggcttcgccctcgacgacgccgacccgcgtccggccgggcctcgcgcacgcgtacgcctcgagctcgcctgcgaacggcttcatctcgaaccgggacgccaggcagctcgctgcgaaccaggcgctcgccgctggtcccagatcgtcatcgtcagcagcctcgtcttcgaccaacccgttcctgacaagcgcgtcgccggcatcgtcgaacgcgatggacctcgacggcccgcctagcagcgtcggcgcgccgcccaacccgtcacccctcaaacggacctcccgcgcccgctctcgctcgcccgactgctcgcctgcgaccgctccgtccttcgccggcgccgagtcgggctcaggccgcaagatccgaaacatgccgctgagagcgacgcagtctcttccggcaccgccgccagcactcgtctgcacggcggaagctgctggaggcaggccggcgcaggacgacagcatgggcggcgtcgagtcggactcgtggccccttgggtccgtctcggagtgggctcggtcagaagacttctgagggctgggtgcgtcgacctagcgccaacgacggacgaacgcgcatatcgccgctgacccccgtctctcggccttgttacagcccctcgctctgccgtttcttgtcatcctgtcctgtacatcagcatggcctcttgcacttctcgcctcgcgtgcaatccgcaatcgataggcgggcgtgagcggtcggaagtggagaacaaagggcgaaagacagacgtcgaagaggcgtgcagagagaaagtgtggtgtcgaagcgagagagggtgtgtgttaggcaatacgatgggtataggagagcaaacgaggcggcggcgagggggataaagcgagcgttgggttgcgttcggcgcgtgagcgtcagagcgggtgttgggcgagcgagcgagtgaagcccgtagcgactcaggccggcgggccatcgtcgagcgggtcggcctgctcgacattctcacagatctcggagacgagcgcactcgtgactccgggaatcctgccagggacggaacgagatcagcctcgagagtggcggtttactccacccgtggacgtacaggcgctcggcgttttggaaggcggcccgcaacgtcgccagcacttgccgcgcctcgtcgttcggcacgcgctggatgatctgggaaagcgcgtcgggcaaggtcagcctcgagtgatgtcaagacggaaaggcgacaggcgcaccgagtcgatgacgggcacgacgacgtcgtcgaggatggctttcgagtcgtcaatctcgtcgtccccttcgtcctcctcgttctcagtgtgccgcgccggctcatcgatcgagccttgctgcggctcccgcacgccgttcgattgggtcggccgctcgtcgtcacttaggtcgtacgcgagcccagcctcctcctcctcgtcgtcctcctcgtgtagctgccgcgtctgctcgggcgtgtagcggaccgtgtcgtaagcggcctggtgcgaccgaccgatcgtgccgccgctcttgagcgttgagttgtcggagaagccgcttgccgtcgacgcgtaagcgctcgaggccttggcgcggagcgaacccgagttgcgcgagcggaccgagccgtagcggttggcctgagaggacgacgatgactgggctggctgggatgcgtactgttggtgctgccgctgctgcgactgggcctgaggctgcgggttcggcgcgcgcgaggagaccgaaggcatcggcggcagcggcggagcgatggcgcgcgagaccgtgccccggcctccgccaggcaggtcgcggcggatcgtgccaaagtcccagagctcggccggctcacccatggtagccctgcagcaggaagttaatgtcagccggcctgcccgtcttgagtgagagacaggagcacttgcgcgtcgtaggcggccgcctcggcctcctctgcggcccgggcgccgcccttggccttccagtcctgatgccgctcgatgacctcggtcaggaagctcgtcttcttggccgtcttgatgaagcggtgccggagaagctccttggccgtcgggcgctagacgggtagacgattcggcgttagcgtcgggtctgcgcggcatgggcctctgcggcgccgaaccgaccttgatcggatcacgctggaggcagagggcgacaaactcctggaaagtcttgctgaactggttgccgagggtaggcggctcgttctttgggatgaggaagaggacctgcaagtgaaaacgtcgagacaagaaatcagtgcgaggggtcgaaactggcggcgagcaaggagccgcaccttcatcgggtgcagctcagcgtaaggcggctcgccctttgcgagctcgatgcaagtgatgccgaggctccagatgtcggccttgaagtcgtagcccgactgcttgatgacctcgggcgacatccagtacggcgtgccgacaaaggtgttctgcaaacaagcgagacaacgtgacttgtcagcaacgacaccctcccgaggccagagctgaaggacgcaccttcttcgtcatcgtcgccgttagctggcccgagacgccaaagtcggccagcttgactgtggcgggcgatgagttggtcagtagtcgtttcgtggctcagccgatcaggtgccgagactgaccatcgccggtcgagctcagcaggatgttggccgctgcacgagagcgggagaagaggacgttaggctacacttaccgctcttactgtggcgggccagactgacccttgatgtcgcggtgaagtttgccctccgagtgcagatactcgaggcccttgagtagctcgcgggcgaggatggcaatgtactcctcgcgaaagacgcccgacttgagctgcaggacgaagttattggtcagcgcacggcccaatatggtcaagaagggaggggacggaccaggtcggagcaggatccgcccgagcagaactccatgacgatccagaggttcgctccgcggaggaaactgccgtggtacctgcgcaagcggtcgatcgagccacccgattgtcagtcgggacggacggacagtatccaacagtgccatgagacgtacttggtgacccaggcgctgtcgagctgcgagaggatctgaatctcctgctggatgtcgtcgatctcgtcctcggcgttctcgaggtcgatgactttgatggcgacgagaccgccggtgcgcttgtcgatcctgccaaaaacagaatgagaggtgtcgtcagtagaggacctcggttcgagaaggtaagctcgttggacggacgccttgtaaacctggccgaatgaacccttgcctgcgcgcgctccgtagcgaggggcgggcgtcgggacgtcagcgccgggatatcagaggcgactgttggccgaacgactgaccgatgatgttctgccggacgtaaagatcctcagggtcctgcatcgcgtgctggtcctggacggagtgggaaggaggtcggccagcgcgtcagccgagggtgcttcggagagaggagggagctcaagcgagcccgtcatcgacgctggcccaggcgattggcgcgggtccaagcagtctgaccgccagtcacagcaggtctggacgtcgtctggtcttcctcttcacccccttggggagcttggaggctccagtctctgcttgtagagctcgcaaagcatcgagcaggtcggcgctgcgctcgggcttccccccttcgacccgtgtccgacctcaggagcgagcctccccatcggtggctctgtgaccacctgatgccgagagggttggaacgcaccttgtaggacatgatggacgctgaaatgtggtgggtggtgtcgaggagggagaggcttgggatgggccgaccgacgggtgttgtgccgggccgtgcgagcgggctgagctaggatgggagagctccttccgagggcgtctaggtctgctcctgccggggagaaggagaatcagctgacggccggcaccaggagaagtagggccagccctgacgatgctgtctaccgtgcgggatccttgagaggcggagagagaaggggggggtggatgatgctgtcggacgatagacagggagggtcgcgccggcgcgcctgtctttgacctcgcgcagtcacccccgcctcgctctctcctctcgagcgctgacgtcgctcgacagtcaagacccccctgagggcgcatccatctcggcggttcaaccgagtagaagtctgcatgcatcgcgctccaacaacgcctaactgaggcgacgaccggcggtatgcagagccgccggaccatcgtctccggcggcctcagggcggcgcaaagctcgacggattcggtcgcctggcgggaagggagcaggacctcgagtgaagctagtgagggctacaggtccttctcagcgcgacatgatgttctgagccagctgggctgggcagcaggccctgatcgagtcgggacacctgctgatggactggatgttcgatcgcgttgattcttggcatccctcttgaaggcgcttgtcgaggctgcttgtcgtatgatccgaacctggccgccgctatgatgcgctcatgagctcgccgattgcacgagcggccgcctcaaccccggcgctgacacgggcccgctcgggtccgtccgggacgagggcgagcaagcgggtgaacttgtcggggtggtacctggtctcagagaaagcgagagacgggcagcgagattgatcagtagacgagcgccaggcatgtctcgacagagaggggcacgggcggctggggcacgacgcaccgacggatggcgtcccgcaagatctccttgcgcttcttaactcgcgcttcctcgtcggcgagcgcatcgaagacggccggcgagcacaagaagtcttgtacagcgccgaccgtcagccagtcgacgccggatcgctcctcgccccgccggcgcttcccaccgatgcccgagacggccgcgtagaccggccaggggatgtcaacaaaggtgagcgtgctgctggccgatgtcgtggttgtcgctgtggccgctgtagttgttacgagctcgacccagcgccgttcgtaggcagcgcgctcctcgcgctgcctgacctcggccttctcgcccttgcggagctcgagcgcccggatccgctcgcgctcgagtcggtcgccctcctccttggcccgctcgagccggatacgcgtctgctcggcctcctcgccgagccgctcgcgtcgggccttctcgccggggttcttgcgccagtacatggcctcgcggatatgctcgacgtacgagtcgtcgtcgagcccgcccggctcgcgcgtcaaagggtcgtcccagacattgtcctcggcccgacgagtcgaccagcgcgaagggattcgctgagccgaggccggatcgtacggtgcgtcgccccagccgacgcccgagccgtcctggccaaagtcaaaggcgtcaaaggcgccggccgggccagagtcgagcgaagcgaggtagcgaaggtgctcgtcaaactcgctctcgtgcccgcgtgtcgtcgacggcgccggtggtcgaggaccaggcgagcgtgaagggctggctcgagaccgcgacgaccgcttgcggccgtggtcgtcatagtcgtcgtcgtcctcgcggcggcggcggcggcggcggtgcgaggatgaggtcgtcgaggacgctcgggagccatgccgagcctcgcgacgagcttgacgggttgcccgccggaaagctttctcctccttgcgggctcggtcggcggccgtatctttgctagggggtgccggcgacgagacgggcgaggttcggggaggagcaagtcaagcgacgtcagcacggggcgacgcagcagcgggggggcgacaggcagctccaaaagtacaagctgagtcgagaaggtccgggttcagccccatcgcccgtcgaggtcatgtcctgtgggctggctgctgcagagagctgcgagggagaagcgaggtggtgtgcaaaggtcgacgtcggtggtccgaacggccgggcccgaagacggctcgaagacggcccgttgcctcaatcgatcgagatgcccctggcctgctctctctctcccaacattcaccgacaggatggcagctgatccgcagatggcagaggtcctcatcgtcggtgctggggccgtcggtctcgtctatgcgtaccttctcgagcaggtccgtcctccaggctggcttcctcctcgtgccccctctcaacgctcggctgacctcgcccaaccttgctggtctctgatcagggcggccatgtcaacgtgactgccgtcgcccggagcaactacgacctcatacagtccaacgggcttcggatagacgccccgggaaaatggggggtcgtcgagggctaccggcctcatcgccgtcggtctagctctgctgctgctgcgcgggtcgacgcaccgagctgaccgtctgctcctctcctcttcagtcgttcgctcagttggggaggccgccgacaggaactacgcggttgtcatcttgacgaccaaggctctgccggacgtcctgccggccgaggtcctgctcaagcccttgatcgacgccgggtgcgcccagaccttcctcctcatccaggcgcgctccgaccccttctccttcagcgtctgacccaaagctgacccgagtcctcgcttgacctcgcgcacagaacggtcttggcatcgagcatggtctgtacgaggcgactcgcgcggtagacgcgacaatcctttcgagcgtctgtcacatttcgaccaagtcagtcttggtcgcccttcctacagtcggcgctcccggctgacagcttgatcttgggttcagcctcgtcggcaagcgcgatcagctcgtcctcgacgacaccgagcgcctcatcgtcggcgtttatcacccgccagagtcgtacaagcgcccgcctccgggcgatgcagacggcacgggctggttgccggccgagacgcctgcgcagaccgaggcactcgagtcggtcgtccggctgatccgcgccggcggtggcaacgtcaaggtcgagcgcgacgtcgagctcttcagatttcacaaggtgtgtcgtcggtgctgttgcgtctgctcgcgagccaccagcgccaagactgacgaaccccttctcgcaggtcatcttcaatgcgacgtgggccgccgcggccagtctctgccgggcgccactcgaagatttccttccaatgctcgacctcgtcggaccctcggtcctcgagctgctagaggaggtcgacctcatcggccggacagctaacctgccgctcgcagccgactttgcccagcaccatttcgacgcgacggtcgcccagcgccgccggtcgggcggacgacaccggccgtcggccgtcgtcgacatcatgaccggccggccgttcgaagtcgagtgtgagtctccaggcagagatgttaactcggggctaggtcagctgacctgccctcccaactcgactcggcaggcacgctcggcaacgtcctgcgactcggtcggcgcgtcggcgtgcccgaatccgacatgccgctgctccgcctggtctatggcctgggcagggtcatccaagctggactcgtcagcagaccggcgtcggcggtggaggaaggggagcaacgtgcggcctcgacctgagagtcacccggtggaggagcaagggcgagcgagtgatagcatgagttgactttgaatgcgagtaactttggcggactaacccctccacccagcgtaactggtcagggcgaattgctgctggcttagtaacggacgacgcccgcgcgtcacgctaagccctccacctttccgggccggcgggcgatcgccgcgagggccgccgaccgtacaagaagggcggccggccatctctccctcttcttactccttcacctctcgccccagcacctcatttcaaccctcgcacaccaattatacgacctcttcttctttgtcgacaatggccgacttctttaagcccgctcctgtttgtccgctctccgagcgccgcgcgcgcagctgagcttgctgggccgactcggctgctgatgccccctcctccgaccacatgctgtcctccttcgaccatatgttgtccatctcaggagcctgcgaccccgctcggccgtctccgagtccttggacctcgtgcaggcgtcaaagtttctccgatctgcctaggcgctatggtgcgggtcacggcaggaagctcggcgcccgcgatccgcagctgacgccgagctgatcccccctcccttcgaccgttctcagtctattggcgaggcctgggcggagatgatgggatccatgagcaagaaggactcgttcgcgctcctcgacgcctttgtcgaggccggcggtaactttgtgagtgctctgcgcgagcgaggaacgtcccggcagggcccgaacgctgacccttgccgccccatcgtcctgcagatcgacacggtagggcctttgatccattccttcatccttgacgatataaattctgacccactttttgaactcaggcagtcaactatcagaacgaagagtccgaggtgcgtcgtcgatcttggctgcctctcgtgagcagagtcgtctggtccaagggctgatcctctccgaccgtcttgctccatcagaaatggctcggcgagtggatggccgagcgcaacaaccgggaccagatggtcatcgcgaccaagtacactagcgggtacaagagctacgccctcggcaagaatgagagcgcggctttcggtgcggtccgagtcgcccgaggcaagttgcgccaggtcgaagctgaccctccgtcgccaccttctgcaggcggcaacagttccaagtcgatgcacctcgctatccgggactcgctcaacaagctcaagaccgattacgtcgacatccgtgcgttctgctgctctggctcggctgccgttgtccgacccctgacgctgtgtgacggcagtctacatgcactggctcgactatacgacctcgatcgaggaggtcatggacgcgcttcacgtcctcgtccagcagggcaaagtcctgtacctgggagtatccgactgtcctgcgtggtgggttgcggtacgtccagtctcccctagtgacctcacgacgacctcgtcactcgtgctgacccttttttgccttctcccgcaggccgccaacacgtacgcccgctacaatggcaagacgcccttctcgatctaccagggacgctggaacctcggcctccgcgacttcgagcgcgacatcctgcccatgtgccggcagtttggcctcgccatctgcccctgggacgtgctcggcggcggccgctggcagacggccaagcaggtcagtcctgcagcgacgctctcaagccggcgcgagattccgagctgacccccccgctgattgttcgtgatagctcgaggccaaaaagcaggctggcgagggcctgcggaccttctttggcggcgaggagcagacggacgaggagaagaagatctcggccgcgctcgagaaggtcgccgccgagcacggcaccgagagcatcacggccatcgccattgcctgtgcgtcctctctcgcattgcgcttgctcgtcgtcctcgacgctgacccacctgtctccgtctgcagacgtcatgagcaaggcgccctgttcgtcccgccgcagcttcctgttggtcgccgaagccttactgaccgtctcgccccgctcacagacgtcttcccgctcgtcggcggccgcaagatcgccaacctcaaggacaacattggcgcgctctcgatccggctgacggacgagcagatcgcgttcctcgagggcgtcaaggagtttgacgttggcttcccgctctcgatgatcggccatgacccgtgcgtcgacaagagccggaaagtcgcccgtctcgcctgccggttgctgatgatatctctcgtctccccattacagcgccatcaccggccaggtccccccgatgaccgccgctcagagcgccatcgattttgtcgccgcccccaagtcgatcagccaccagtgaggcggcccttcgccccttgattctcggctcaccagctccgttgtatctgtctctcgactgtctccgatgaccacttttcgtgagcgacactagcgaccgcagatgacgcgaaaaggggccagcgctcgagcgcgcgcgaccgaccacgggcaacccggcccgcacctggctaccttcaggacctaggcctgacacgtccgagagcataggcggggctactgctgggaagcgaccgatcaggtgtcgctgatgcctgcagctgacgccggccggccggagcccgcggaaacgcccttcagagggggcgaggcgcaccgcgtcgttcgttgccacctaaccatcatcatcctcctccccaccagccgcaagccccctttcaaacccacccagcccttatcgcaagccaagctacgatgctttacaaggtcggcacccaagtcacgtacaaggccggccacgggacaacgtcggccgtcgcctctgccatcctggaggagaagactcgtgcgtccctgccacaagccctgaacgtcctcttcgctacctggccatgtgctgactcgcattcaggccctcggtgcgctatcttgctgtccagctgatggcgagaccaagtaagtgctcacgattacgtcgaccgtcgatggatgcgccggtcgctccggtctggcggcgtgtcggcgcatgaactccgccctcgtgcgctgacatcctcctcctcctcctccatcgtcccacggccggcaagggcaagtccgtcatccgccgggttagtcttgcttgcgtcttctgactttttggcctccttgccagctgcctgaatgagtcccagctgacgcgtctcccctctcccctcatcgcatcgccgctcgtcgcttccggctcaacaggaaagcgtcctttcccgggcctgagccagcccgtccccttggcccaaccgcctgcttgctctctcaacacctgttgcaacgcgtgacgctcggccgagctagccgttgtcctccgtcggccctcttgtgcgtggacctcggctcgggcatgctgccgtcggccaaaatatctccgaatccaacttgcagtcagtactcttgggcgcgcatctatggaagggcccaattgaaccccccccaccccctcgaccgtcgcctcgcagttcctttctttttgtttgactacatgcgagcgagaggtgggggcagcgagctcggtcctttcgagtggcctggtgtggagtgggtggcgatcttgatggcgcatacggtcgatgttttgagagcctcgtggcgagactgaggactaaacggcttctacgactgacaggacaacatgcgagagagcaagagatacacgggaagaaggagcgatttgggcggcgctcaaacgacgcggatgacaaccttgccaatgatgccgccttcccactgcgtctggtaggcctccttggcgtcctcaaacgcgaaggtcttggagatgagaggacggatttcggcctgcgacatcgcgtctgccatgtcctcgagctggcgccggctgccgatgaggatgccctggaggcgtgcgctcttatacagggcctgagcgccgatgttggggtgctccttgtgctcgccgttcgagagaacgccgatggcctgggcgaggaggagggtgtcagtcatccgttcgacgacttgggtcggcgctcggccaggcctagacatacagagatgacgccgctctgccggatggccttgaagctcgcctcgatcgttcctgccccgcccacttcaaggatcctgtcgactccaacgctgccagtaatcttgagcgcctcggccgcccagtccttctgctttgcgtagttgaccgtgtggaagcggagccggacggccctctcgccggcctgctttaccaagtgcttccgaacggtctcgagcttctcgtccgacgacgaggtcatgatgacgcgagcgcctgtgtggagggcaaactgaagggggcagaaagggacgtgtcaggacgggggcgcgcgagggaggagggcgcatggcggcgacgcacctgcgcgccaaacacgctgacgccgccggtgccctgaaaaagagccgtctggccaggccggagcgccttctcgtcgccgaacctggtcgaatccgtagtaggtcagctgctgtcgaggaagggcagcagccgagcgctcgagactcacagcgcgttccacgccgtcagcgcagcacacggcagcgtcgctccctcctcgtaactgaggtgctctggaatccgaacgaggccgtagtcctcgagaatccggtattgcgtgagcatgccctgggcctgagcgccgagcgaggacgaaaagtaggcggcgtcgaactcgccggcaagctgtgcctgcgtgaagttggcctgcgatagagaggcgacgcgaaaggcgagcgagcagtatcagcacccgcgcacacgagcttatctcgaaggaagacgtacgacaacctggtcgccaaccttccacttggtcacgtcctcgccgatggcgacgacctcgccggcgccgtccgaggctgggatgagctgcagaagcgcgccggtcagatggcgtcgtcagcgcaaggagatattctcataagcaagcaaacttcgactcacatccggcgccatctcagccgggtagaggccctgggagggttagaatgagtgcagatggtcggtcagcaagagaaacgcctgagctgggccgttcttcggtggagcgagcgcgatgcaccttcgcaactggtcaaagcaaagaagacaggcgcacgcgatcagcctacatcctgagctcttgaagaggcgcattgatgcggacctgccaaatccctgtagttcagagcaacggcgtgaacccgaacgaggacctgtcctctcttcggctggccgagcggctcgtcgtggacgagctcgagcccatcgaagcccttgccgggctggacgcgccagcgagagtaggtggtcgggatctggggcgacatgttgctgacgctggaggtagagaaagaggacaagggtaggtggtggttgaagaggagggagagagatgcggctaggtcgatccttaaaagccggctcggagggcgctccgacagaaggtgctgcgcgcgccgctgaccccctccacttttctcgctgacgcacacgcggatttcttcggctgactcagactcatgcagatcgaaggcttgcacgccgagcggcagcgacgacaggcctttaacgggtactaacgggtagcaacgggtagtaacgcaaacggacgcaggtgacggccgggcccgagggctgagggggtgcgtggggtgaagcaggaagggaaagcgagagcgatgtcgcccagcgatagtgccgcttggttgccgtagttacgctagaagggagtatcggccacgagaggtcagcacggggcctgagtagaccagagcgaggataaaggacgcacgtccccgccttgcgaatactactgctgctgctgctgctggccctggccctggccctggccgccctggccgcggttgttccgcgagcgaccaccgccaccgcctccgccgttgcgcgggccacggccgcgaccgccaccgccgtagccggtgccgttgagcgactcgccgacttcgccgaacgtcatcaggttcgtctggcgctcctcgtcgcgccatgcccggccacggacgacgttgctcccacgcggcggcggccggccgccccgtaccgtgccggcaaagtccggccggaggtccgacgagatcgagtcgaagaacgaggtcgacttgttgtagaactgctgcttggccggctcgcccgacgccgtcgacgtccgccggtgttccttagcctcgccgccagcggccgtctgctcgtcgtcggacgagtcgtccgagtccgactcgacaagcacctcgcccgcctccttggcgaccgaggccttgtcaaactttttattgccagcctcaaagtcgaactcggtttcgggcacgctgacgcccatcggctgcggcggctggtgctgcggccggccctgctgctgctgctgctgctgctgctgctgctgctgctgctgctgcggctgctgaccaccgcgcggggggcgctgactccgagcctgcgcgaggggagcattgctgccggcgggagcgttggtcgacgacgactgatggcgcgacgacgggttgagggcggccgggccacggcctccgcgcgagacgctcatctcgccgagcgcgcgctcgatcttgtcgaggttcgtctgcgcggcgttggccaggagcgccggcgctgccggggcggccggggcgttcggcagcggcttgagcgcgatctgggggatgacggctccacctgctggggcaggcggcgacttggcggctccggcagcaacggaagagaaggtgccctgcgctcgggggccggcgggggcctggggcgaaggaggatcggcaggcttgccagcagccgccgagcccgaggaagcggccttggaggcggcagctgcaggcgttccttcagcctgctgctgagccttcgacccctgcggcggggcggcgctcgactgctgaggcgcaggcggcagggcagcacctcctggcgcctgacgctggacaatcgggctgccgttctgctggaagggagggccgcccatcggtggcggcgggtagggcgcgccggggggaccgccgaagccgcccgggccagggccgtacatgcctccctgcggaggccacgggccctgaccagggggcggcgggggcatgccgtagccgccgtagggtgcgccgggagggcctccataaggcgggtagttctgcggtggcggcggcggctgggggtagccggccggcacctgcggcgactgctgggcaggaggtgggcgcgaggcggcctgtgaagggagggaaagcggtcgaaagcatcagcgacttctggtcgtctgacggaaccgcgagtgatgagcgactcacacccatgattgcagggtcgtccggaacggcagcagcagctccgggtgccggagactgctcgatggcgaggtccttcacgtccttggccctgcaggtcgttgggagagcgatcagtcgtcgagcctgaacgctcaaggcggcagcatcgagcgaggtgcgcaccggaagacgacaaagtcgtagacacggtcactcggcggtacaaattggtcctgcggcttgcgcgtttcggtaccgcgggatgagactgaggaggagggcgaggttcgagcagcagcgaagggcgtcagctccctagcctggccagcgaggcacccgaccgccgagaagcgagcgacggaccattctcgagcgagattgtgctctcctggtggtcgatcgagtggaggcggccgacgtagcgaatgtcgctgaccgaggtcagcgtgatgatggctctgtgcgcggacgaagaagaggagagagaacgagtgagcggttcggcctcaaggcaagcacaagggcgggcggagggttggtgtccccctcgactgaggcacacggcccgcccggcgacgtgagacgcacccgataaagctggcggccatcgtggaagaagccgagtcgcagagaaagaagacaggaggggagagagagacggagggcgagtaggtcaagtctcctcgagccgaacgagatggccgcccggcctaaccttttttctttttcctctccgcccagcgagacgacgaatcgtcgcagatgcactcctcgagacgagcctcctccctcagggacaaggagctggcatgcggcaagcaatcatgttcgtcttgatggggcgacagcccgccagtcgctccgtgcccagtctgcccgcgagacgacccgctcctcccagtcgaccggctctgggccgcgcttctggccgtcgccctcgccgtcgtcctcgtcctcgtcgaaggcctccttagcgtagtgtgcgcggacatgcacggtcgcggacgaggccgagaccgcgacgaccttgccgtgatgcagggcgagcgagggagagtacgtcgtcgggtcgaggatcagctcctgacagcgggggcgaagcgacgacaacgaggtcagcacactgacggacgggcgacagactagacaaacagaacgcactacgaagatgacctcggagccgacgcgaaccgccccccaggcgagcgggccggccgtcgcgaaggccgcctcgagtgcggcccagtcggcctcatctttcggagcgagcgaggcgatcggcgctgctgatacgggtgtcgaaacgggtttcgctgccgctttcggcgccgctaccgtctgagcagatgcggccggctcatcggctccgtagtcgagcgctatcgcgcccttctcccagacctgctccttgaccttgctctcctcaaggccaagataggccgcccacacgccgccgccgacgctcgcctcccagaccggatcctcgacgtcgaccgagctgacaaacatacccgggggcaacgacgagggcggccggtctgacggcgcggaaaggtgcggtcgaggcgtcgccggctgctggcttgcgacggaggggcggcccttcttcgccttcctcgcggatgatgagttcgacgttggggtcgcgtacaaggccggaggagcgacggccgcgtaaagtggaccgcaacccgacggctgcgacgtgcgagtggagatcggggtttccggccgacgaggggcagccggactggccaccgcgaccgtccccagctccgatggcgtctcggaccccgaaggcgagtcaaagaccgtcctgaagccggacagaccttccatggcagccttcttaaaggccttgcttttgttgcggttggccgaggtcgtgaaaggaatggcgagctcggtaacggccggctgtgacaggcgagcggccgcaacgtctgccgcggtcagcgcaacctgatcacgctgcgtcggcaggaaggcaggtggtggctgctcggcgctgaccgaggcttcgagtgctttcagatcggtgtcggccgattgcgaaggcgtcgctaccggaggcggcgttgccttcgcgccattcgtggcgacggacgaggtcgccggcgagcctgccgaagcgccgccggctgctctcagcgccttcttcttggcccgccgccggaggttgcgctctcgagttgcattcgagcccgaaccgggcggtacgggaggttgggaaggaacgatgggcgtcaggcggatcgtcgtccctgtccgtggcacggccgctctggaggcgtctttgcccggcgctggtttccgggatgacttgaccgagggtgcggaggagccgctagacgacgtagacgaggagctcgaagaagaggaggatccgctggaggagtcgtctgagctactcgccgacgagtccgagtcggagttactgtcagactcgctgcttgacggcgcacgtccggccggctcgacccgagtgacagcggccggagtcgcgggagcgctgggcaagctcatgttcactccgacgctagacgtagcaagcgctggagtaacgactggcggagcgaccgaagccttggccgagtgcttcgcctttttggacggccggcgacctgctgggcctgcgccggcggcagagacaggttcgaccgtcgagctcgatgccacaaaggcggctggcgtcgggacgggcactggttgcggacgcttccgcttcttctgctcgccagagacagcaggctcgaccgctggtgttgcaacagcgccggccgctggcggctgctcgagagccagcgcacccgcctgcagcttgacgctgctcgacccgcagagaagacaccggggtcagcaagttcgactgaccgagtagcagcacgctgagacggacctgataacatccccttccctgacgagctcgacctgcgagccgtcgagcagctcccagccgtcgacctcgagcaggagctcggccggcgcgacgccccgcagctggccgaggttgtggaccagctgggccttaaggtcgccgatcgtccgggacgaggctgcgacgaggaagagcgctttgagcggcacaagcggcggtaaggtcgctatccggagccggagcgtcgccatcgcagacggagagggcgaatcgggaggaaagacaggttgaggttgagaggagaggcgcggcggaggccgggccctgcgagaaggaggccgagaaggagagccggcgagctgcctttatcccccttgattcatcattcgctcaagcagggggagatcgggggcttcagcctcctgttatcctgtgcgtgctggtagaccctccctatgagctcaggagggcggccaatgacctgctggctgccctgtcgccgctgcggtcgacctcgtcgccctttcctccgcccggccgccctcgtcgctggtaaccctctttccaccatctcgctcgaccggacccacccattgctcttgcccgacgagacgagcccactttcgacatggcatctcattcaggaccagcgacggctgtcagcagacgtcgccaggatcggtcgcttctcagcctcgaggccgcacttgagcacccggtcctcgccgcgtttgtcgtgctcgccttcgtccggcttccgtacctcctcctgcgggcctacctcagccggcgtcgggcggcttcggatcgtcgccggtcggccctgcttgcttcggtcaaaggcgaccgccgccagcatgcgcgggtcgtcggtctcttccacccgttctgcaacgccggcggaggcggcgagcgcgtcctctggacggcggtcggcgcgatgcagcggtcgagcccagacttgacgttcgtggtctatacgggcgactatccggctgctagcaaggaggccatcatcgaaagggccagcgtgagtctcttgtttgagcttccgggcactgcagcggtcgttgtgccgacctaatctgctctgccggcgctgaccggcccctccctttcctcgcctgccgtcatctcggccagcatcacttcaacatcgcgctcaagtcacggacgatccatctcgtcccactcgcgtctcgccggctcatctcggactcgtactggcgtcggctgacgctcctcggccaggcctttggcgcagtcgtctgcgcgtgggaggccctcgccgggccggcgggaatcgtgcccgacgtcttcatcggtaagttttttgcaggcgtcttgcgcaggccctcgctggtttctatagatgctgatcaccggtcgtcccttttttttgtcttgcgctagacacgatgggctacgcttgggcctacccgttcattcggttctttgcaggttccgggatgccgctgggcgcttacgtccactacccgacgatcaggtgcgaaagcctcctgtgatttcgcttgcatctgacggtccacgtcggagctgattccgaccctccggcctcggcctttcgcccagcccggacatggtcgctcgcgtccggcttcgccagcacacgcacacaaacgttgccaccgcccgctcgccggtccgatcggcactcaagctcgtctactatgcgctgctcatcagggcctatgcctggtgcctcggctttggccaggagatcatggtcaactcgtcctggacgaaagctcacctcgacacgctcctcggcagcggcgccgacgggaagggtagcgctgcggcgcccgaggagcgcgtctgcaaggtcttcccgccgtgcgagacgggcgacctcggcaaactgccagtcatcgaagccaagcgcgagcggattgtgctctcgctcgcccagttccggtgcggcgctggtcccttgtccaccccggcctcggtagctatctcgctgactcatcgccgacttacccgacagacccgagaaggatcatccagctcagctgcgagcgttgaatgagttatttgccctgcagccgacctggcaggcgccaggaccgcagcaggtccgactcgtcatgatcggcagcgtccgagataaggccgacggtcgccgagtcgatgcgctgcgatcactggctaccgagctcgacattgctgtgcgtgtttgccttcgtcctgatcgctcaaggcgacccccgctgatcacctcgtctgatgccccctggcaggacaacgtcgagatcgtcgtcaacgccgattacccgacgctacttgcctggctcgctcgggcgagcgtcggcctctcgacgatggtcgacgagcactttggcatcaacgtcgtcgagtttatggtgcgctgcttgacgtgacagcccgctgacgtcaccagcacgctgacactcgtcgtcgtcccgcttccgtccctttcaggctgcgggcctcgtccccctcgctcatgcgagcgctggcccctggctcgacatcatcgctccctacccgctaccggcatcgtacaagcctgcgctcgactcaccgccgtcgctcgtcacacggacggggtggcacgccaagacgccgcgagagttcgcggcctcgctcgtcgagatctttgacctcccgtcggccgagcgcgaggcaatccggcaccgcgccaaagctagcgtcaaggagcgtttcggacgagaggcgtttgaggaaggctgggatcagagcttgacgaagctgctcagtcggcttgagaaatgatgatcggctgatgtcggagcgaacgaaagagagcgtccgaggtagctggcgcgcaggaggagcgcaacgtgttcgtcaggtcatcgtgggctagctgctggacaccgttggccgggccaacatggcacggccgtggccgttgacgacttgacgtcgctcgaagaggacatgcgttcgctgggctgatgagcaagtgcacgaggagggctgcgcgggcgggcggaggggcgagccgctcgaccttgctcccgaaccctgaccctcacttctctctcgacctcaagacatccccgagctcacctcgcgcctcatgtctctgctcgtcccgctcctccagcggccgatggcggcgtgcagcggcgccaccccgaggggcgtcttccggtcgaccctcggcctctcgcgtgctgccaccgccgccgccgtcggccagttgagccggcagactagcagcaggccaccccggccgtcatccagctctgtcccgaatttcggcccatcagcagagggcagccactgggaggctgccaggagggccttttcgatcgagtcgcgtcggcgccaggtggccggcaacacgaccggtgcgtccgtctgccctctggcagctcgtcggtgctctcagcctgcagtccctctcgctcgtgccatcagagccagctggtggcaagtctcagtcggtggagactgacagcgactgcctcctgttcctttcttctgccagacccgccttcggtgccgccggcaagctcgagctcggccccgccccctactccgtctacgctgcccgagccgacgtataggccactgccgccgctcacgccttcgcggctcttctcgctctacatgacgctcgccaagtcgcggctgtcgatcctcgtcgtcctgacgtcgacaacgggactcgcactgtcgccttacccgacgaccgtcccggtcctcgtcagcctgaccgtcgggaccttcctgacctcagcggcggccaacacgatcaaccagatgtttgagcacccgctcgacgctcaggcgctgaggacccgggcccggccgctcgtcacgcgcgccatctcgaccccgcacgccgcgctgtttgcgctcgcgaccgccgtcgtcggaacggcgctgctgtactacggttgcaacgcaacgacggccgcgctcgccgtcttcacgctcggcctctacgctttcgtttacacaccgatgaagcggctgtcgatctggaatacgtgggtcggcgccctcgtcggcgcaatccctcccgtcatgggctggacggcgaccggcggcgagctctggccgacgcgcgagcagaaggagcgcttcggcctgccggcgtggctgcccgagagccgcaaggtgacgatcaaggtcggcggtcggcaggtcgaggagattgaggtgcccgaaggctgggcgacgccgagtgtcaaatcgtacctcgcaaaggagctccagcggcggacctcgcacggcgcggccgacgacgagatcccgctcccatcgattgccctcccggatgctcacatcccgacgctctacgtcgccggcgacgacgacgccgagccgcgcgaggttgaggtgacgctgctcgcgcccttgacgctcgccgcgcttctctttgcttggcagttccctcacttcaacgcgctctcgcacgtcctccggtcgtcctacgccgtctcgtcataccacatgctctcggctatcaaccccaagaagaatgcgctcgtcgccctgcgctacgcgctcgtgacgatccccatctgctcggtcatggccccagcgtcgggcgcggtcaccggcctctttgctctgacgtcgcttgtgccaaacgccatctttgcccgtcgggcatggcagttctaccgccggccccgggaccagacggcccgccggctcttctgggactcgctctggtggctgcccgtcatcctcggcctgatgatggtccacaagaacgacgccggctggcttcagggcgtccgccagtcggccgccggccgctgggtgcgcgatagccaggccgccgtcgtctaccgcgacctcagccgctgggcgaggggcgagagccgggtagaggaggctcggcgaactcttgagctcctccgagaagatcaggtccggcaggacgaggcgctcgagcgggccaaggtctgatgatcaatgccgacttctgagatcgcgttccgaaaaaggacatgctacaagcggtttgcggagcggggaggacggatgccatggggaacaaagggtagccgagaagggcgacgaaacgaaggacggtgcggacgcatggccgcgtacaagagagaaggcaaagagcaagcggatccccagcgcaaaggcgcagagcagatcacagacgggcgatcagagcttggccgggactgcgacaacctcatccgactcgtcgtaggcccgctcgagctcggccgcaaacgtcttcttgacggcctggcgcttgtacttgaacgacggcgtcagcaggtcggccgggaaggggtccatcgtcctgagtagacgaagccgtcagcatcccgtgcaacgaaagggtcgccgatggaaaggacgcacaggtggatgcccttgacgagctcgtagccgttgagcttcttggcccggccgtgggccatgaggctctcgacgacctcctgccggagccggcggccctccttgccaccgtcgttgacgagccgggcgacgtcggcctcggtcttgacgtttggccagcgcgcgcgccgctgggcaagaaaggccagcatttgggccgggtcgacgactccaatggcgacgaggtgattcttgagcgagtcggcgtggaggtagaaggcggcaaacaagggagagaccatgtagatgttctcgaccgtctcgacggcgacgtactgcaatcgcaacgggacaaaagaggcgacgacggtcagctcgatacgtcaaagcaagcctcgacggatgcagtcactcacctcgccctgctgcagcttgacaaggttcttcttgcggtcgatgatctgcgcaagaaaagaggcaagtcagtcgtcgtgaaccactcgaggcctctcttagtgcgcgcaagggatgaaatcgcaccttgaagcggccggccgagtcgacggcgcagacgtcgcccgtgtgaagccagccctcgtcgtcgagcgcctccttcgtattcttctcgtccttgtagtagccgctctgatcagggtcgacgcgagatgcagcgagtcagtcgaaaggacgctgccagagtcgaaggagggacagcagcgacgaacgaagacgttggcgcccttgacgcagagctcgccgcgaggcatgggcgagtcggtcgagaggtagcccatctcggggactgtgttcggcaggtcagatcagcatctctttcccagcaagggacaggtctttgaataggggcgcaccgtcgacgagcttaaactcgttgatgatccgaggggcgccgatcgtgcccgtcgctccggggtcgttcggccaaccctgcgcgccggtgccgaccgtctgggaggaggtgatgccaagcgggtcagcagaaggagtgaaaagacgcaggcatcgaaggagaacgcacctcggtcatgccccagccctggagcacgcgagacgttcgaaagagcaaagcaggacagtacgtcagaggcggcttcaaggtagccagaagacgacgacgtgaggacgcacctcgatcgagtcgacggcaaaggcgaccttgagcgtctcaaagacctccttggcgatcggggccgagcccgaggtgtggtaaaggagccggccgcccataattttctggaccttgctaaagacgagccggtcatagaccgggtgcgtgacggcgccggtttcgcggaagtttgcaatctttgtgtcgatcgcgtgccggaggagcttgcccttgagccctggcgccgaagcctgggcggcgatggccgcgtaaatcttgttgagcgcgcgcgggaccgaggggaagaagtgaggccggaggagctggacgtcggcgaggagccggacggggtcgccggtcgagtagccggcaacgcctcggaggaggacgatgagcaggtcgaggaagcggccgtagacgtgggccagcctgttgaaaggaaaggagaaaggggcaggggcatcagaggctgaaatcgttggaaggccacgcagtggagatcgcacggcaagtaggagatcatgacggtgcccttgagcgggaagttgcagccgtaggcgttggcgatctggcaggcaaggtgtcgtcagtcggcgtttatcagctgttgcggctcggctgttcgaagagggagaagggacgcacgacggccgtcgtcatgctccggtgggtgaggatcgcgcccttggggttgccggtcgtgccggacgtgtctgtcgggtagaaggagcggacagcgtcagtgagggccaagcgaatgcggaggatccgataaatgtggaccgacagcagagcgtggcgacattctccggacgaggcggcatggcctcgatccggtgctcgcgaccgagagcgcggaagccctcccagtcccagagggcgactcccttgctctttgcccagtcatgggcgagcgtcttgctcggcccgacgagggcgtccatgcagacgacagccttaacggtcgggcactcgggcaggatcgcgagcagctcggcgaggtgggcgagcgtgcagaggatgatcggcagctgcgcgtggttcgagacgtagacggtcgtgttgggcccgagcgtgtcgtagagagcgacgctgacgaggccaaacgcctgggtcgccatgtcggtcatctgccactccggccggttgccgctccagatgccgacactccagccctgttcgggcccgacaggccgggggtcgatccgctcgatcgagtcgggcgagccgaggacgcccgaccggtagaggtgcatgagcgccgaaccgacctccatccgggcctgctcgagctcgccgtaggtaatcgtctggtaactgtcggcgtagagcgccggcttgacgcccggcggcgagactgtcggcaggtaggcgagggcgggctcgttcggaatctcgtccgtcactgcggaatgggtgattaccccaggtcagcaacggagtgcggcaagagaaggagatgcggagatgcgcagccgggacgaaccttgcctgacgagctcaaagagcgtctggggcttggggctcgccgttagctccgaggcgtcggggaagatggtgttgcggtagtggccagtctggcctggtcggcgggtgccgggtacctcctgcaggccggtaagcgagattcgggggaacacgcggaggagcgagggcgaggttggggtggtcataggtcgtcagcgacaggtctcttcaacatcgcagaaagaaaccctcgcgttcgagtggctcacgctcgaggaacaaccctcgagcaccccgccagtgcgacaaccagacagagcagggaggaagggcacgcacggacgccaggttgctgagctgcttctggccgagccggccttggcgctcgagctcggccatcgaggtgtagagctttgcgcggtcggcctcagacgcggacggtcggaaggtgggcggcatggcgggcgcgagatggatgtgctgagggggggagtgaagaggaaggggtgagagaaggggtgctgaagagagggagatcagcaggtcgaaggggagggagaccggcctcgcgcggtcctcaaccctgagcccttgcgccgggccggcaattcgaaagagaccggccgcccgcgcgttgcccgagagctttttaaattatggaccctctccctgcgcgcgccgcggcctcctccatcgcgagtcgagcgagcgtccgacctcgaccggccttcccttcattgtacaccaccacccctctcaatcagcccgccatgtctgacgtagactcggacctcgacgacctcgatgatctcctgccaaccttccagcggccggcggccaaggcgaccccgccagctgccactcgcccatcggagccgcccgcagccgccgacctcgccgccgccgacgacgacgacgacgaggctgcctttgccgctgccttcgagcaaaacatggccgacatgctcgccagtctcgccggagcaggccagctcggatccgaaggaggaggaggggtcgacggcgagccgccggccgagggcgcttgggagcgcgcgttcgagcaggccttggcggacgcgtctcgcaacggcgccgccggtggcagcagtagcagcaacggcgcaggagccggcagcaggagtcaaccggcatcagcgtcatcattaacagcaacgccggcaggagcggcaccgggcgctggcggtccggccgcgggcaaggccgacttcaagcagacggtcagggagacggtcgaccggctcaaggcctcgtccgacggagcgggctcgacaagcggcgtgcgtaccgtatcctgatcgggttgcctctatctttatcacagctaacgtccataactccgcctccttccttcctgcgcaggccgacgaggacccgctcgccgccctcctcgcctcgctcgggcttgaccccgactctgctgccggcctcggtggcgctgccggcggagacggcgaggacgacgacggcgtgctcgagcgcatgatgcaaggtctcatgagcaaggacgtcttgtacgagccgatgtgtgagctcgcagagaaggtgcgtcgtcgttgtcccttgcgcgctcttacctctgacctgggcgtctcgtggccagccgcagccgacttgaatgagctgacaccctcactccctccgctcctctcctcccagtatccatcgtatctcgcctcgcccgccgcgcgcgccctcgaccctgcacagctccacgcctacacggcccagtcagccttggtcgctgagattgtcgccgtcttccgccagtcgtcgtacaccgaggacggcccgcggggcgagcagatccggagcgaggtgcaggcgctgatgggccggatgcaggatcttgggagcccgccggcagaagtcatgggggagatgccggattttgtgcgtccctctgacttgcttccgatcaacgcggccgattcgggttgaggctgacctgattctctctcccccccatcctcccccttcccgggtcctgctgactgctccgactttgccgcccgctcacgctctctcgacgtgctgctcccgcctcatctcgcactgtaggatctgggagccgaaggccttcctaagctgccggcagggcttgacgggcctgatggttgcgtcatctgctgatgtggcggaggtagaccaggcgtatagcattgggcccccgtcttcgtctgtgatgaggcgagatgaggcgagtttgtgactggataagggaagggagtgcgccgtgcggaggcatgagccgagctatcgccctcctggtcggggcgactatccaggtacaggggtcccagacctgggtttcctaagttgagcgagaccttgtcggatcgagctcaagccttgctcactggaagcaggcgacggtgcccggttgtggatctgccgcatgaccggggggtcaaacaggcgattcgggtggaatcgaccgggagggtgagtgacgccccccccctccctagcgccctcaaattcaccgcgaccggcctccgccagtcgctctcacacccgtccgaggagctcgcccagagcttcacgaccgcgtacgaaggcacgctcaggcagtaccactctttcgtcgtccggccagtctttggcgtgcgttccccctccgtttcccttcgagtgcgctgtctgttgggctggaagggagacgattggctgacggctcctctcatgcgcctttgatcggttggggttggacgcacgggcacacaacagctcgcgatgaagagctgcccgtaccgcaaagacttttatgagaagctcggcgcgccgctcgaccttggttcgtccccctcctgcgccttctctcgccctgtccccctctcttcctcctcttcctcctcttcctcctcctcctccttctcctctcctgctcgctcactcgctcttccttccgcatgtctcgcgaacgctgacacaacgcgacgtgtccttgtgcgcgtgggcagtcgagaaggagctcggcgaatggctcgccgcgctcgaggccatcatccagcagatcgaggccttctttgccgcgggaaagtgcgtcctccgtcccccccccccaacccacctgctttccttccttccttcttgccttccgcctgacgcgctcgaggcttggacgagcgcacgtcttttgcgcgcgccgatgctgactggggctacacaacgacctcacgcgcactcgctcgctgctgcagctgggccaagggattctagagcgcctcccctccctccgtccgcgctcgccttccgtccgtctgccaaagacgacccagcgagggcacgcaggcaagcagtgtacaatcagatgtcgatgtctcgaatcctcacacgctgcggctgcagggcagggcagagagggaaggggggcgttgcacgcagcagcagcagcagcagcagcaggcggggccgtcgtctactcgctttcttgttgggtcagctagcaagcggtcgacaagacttcggccaagctggctctgggcgttgagctcgctcggtcttgcaggacgaagcgagtcgtccgggcagcgttggcgttggcatcctcccgccgtcgcgtcggggtcgaccgacccagtcaccgacatcgactgcccttgctcttcatctccagccctcgtctctttgggaccgtccccgtcacagccagcgcgccatgtcgggcccaagctcgcacctcttcactccagccgtccctcaagccgccgccggccctctgccagtaccaccacccgccgccgccgcgcccgccgcacccgacgcgtccgtcgtcgtctcgcgccttacccacctcgccgaagcgcacctttcctcaccccacctgctcaaggccgccctcttcctctcgtcgctcctccactcgctcctcctctcacgctcgccgaatcccgcttcctcttcggcatcatcaagtgcggcggcgccggtcgaggggcaggggcaggcagcagaccacaccggccggctcctttacgcccgagcgctcctcgccgccggccagcccgcctcggccctccacctcgtccagcacgcggccgtcggctcgggcgagccggcgctggtcgggctcgcgcaagaggcgtgtcttgcgatggggaggtggagagagggcgcctggctcggcgaggtcgggaggaaggctagggagaagaagccaggcggcggcgggagcgcgtcgtcggctcctccttctctcgctggtacgtcccgtgtcctttgtctccgaaccattcatcgtctcgctggctaatgaccctcaccctagtaatccacctatcaaacgccctgctctctccctctgagcgcgtcgcagccgaccacgtcctccaagcgaccctccaccagcgcggcaacgagcccgccaaagcggccgagcacttcgcaaaggcacttgaagccgacagtctctgctgggatgcgtttgaggggctttgcgagcttggtgagttctcgccctttcgcttgcccttgcccttgctgggacgatgacgagccgagagctgatggggcgactccttgtccgcgccaggccactcgttcaagctcgcagacatcttcccgcccctcacttcgccgctcccgacctcgacacatgcctcggcagcagcggcagcagcggcgcttagcgtctcctcctcttccgcgccttactcggcccaggccccggcgacgacgtcggcccaaaactacgcgtctccctcgctcccttcgcagctccatccccagcagactcttcagcagcagcagcagcatctcgtgccgggaggaggagggccaacgacgacgacgacgacgcccctttacccgtcgtcaattcacaaccacacgtccctctcgttcgccaacctgagccttgtacagccctcttcggcctcctcctccgcctcttcgatggcagcggcggcgtcggcgggcgaaggggcgacaggaacaggaagcgacggcgttggcctcccgcccgcttcgaagcgcccgcgcgggatcagcggggccggcgggcctggaggggggctttccgagggcggcggcggcggaaaggcgaagggcaagccgaggttgggcggggtcgcggctggtcagatggggtttgcgccggtcgaggagggcagcgggagggcagcggacggcggggagaacgtcaggaggagtacgcgattgagcgtcaatggcccgacgacgacgatggcagcgaagggcggcggcgtcggcgagcgacgatcaaaggtgcgttctctcgctgcgtggtgcaacactcgcttggctgctggtgcagcaaggacgctgatgttggcccgccgcccaactgcccgcagacgctgccgaaacggcgcgcgctctcgccgccctcgtcagccacctcggacgcgtcgttcgccgagcaagccctctcgccaggatcgacctctggccccttctcgcgcaccggcacgcccctctcgctcgcctccaccaccaacgccgccgccggcagcaggagcagcaccgccgcgcccgtcgtccccggcccgacgccggccgaactcctcgcagccgataactacatcctcggcgtcctccgcgcctggggccgcgcgacattcctcgccggccggtataggtgcagggaggcgattggtgagctcgatgggctgccgagggagctttgggaggggagcgtcgaggtcaggctgctgcttgggaggtgctggtatgagacggttgattacatcaaggttggtcttgccctcctctccctcgactcgtcccgaaaccacgcctcgtgctgacgctgatgcccctcgctcttctttttttcgctttaggccaagcgcgcgtttacccaggcccgggcgctcgatccctaccggctcgcatcgatggacgtctactcgaccctcctctggcaccttcaagacggcgtcggcctctcgaccctcgcccaagacctcctcgacgtctcgcgctcggccccggaggcctgggccgcgctcggcaacgccttttcgctcggccgcgagcccgacgaggccatgcgctgcttccggcgcgcggcccagctcgccccgggctatgcgtatgcgcagacgctgagcgggcacgaggcggtcaacatggaggagtatgaccgggccgtcgcgttcttccagacggccgttcggatcgacaagcgccactttaacgcttggtgcgttcgtcgtcccctcttgtgtgccaggacctggcctgctttctgatgcgagtgacgaccgcgacaggtacggcctcggtgtcgcctacgtccggaagaacaaataccgccatgccgaacacagcttccggcgcgcggtcgacatcaacccggagaacgccgtcctgctctgcagtctcggccaggtgcgccgctcgacgggcgtgcactgcgagcgccgccttgtacggcctcactgacacgttaccgctgccgcatgcaggtactcgagagacaaggccggaaagatgaggcattgcaggtctttgagcaggcctatgccgttgacgccgacagcccaatggtcggcttccggcgagccaaggcgtacgcttcggcaggccggatcgacgtccgtcccttcgctgccttgcattcgatcagccgctcgagctcatctctccccgtccgctcgtccgactcgcagattgccctcccggccctccagcagctcgccatcctcgcgccagacgagttcaacatccactttctcctcggcaagatccacctggcgctcggcgaccggccgagcgcgacgcgcgcgtttgcctccgcgctcgacctcgagcccggaatgggtccggcgatcaaggcggcgcagacgccgcgcgagtcggctgaggatgatcaaggcgtgacagagggaagtcagatgacggagggtgcgggggcttgacagtccgccgtcttgcatgtctatccgtgcgcagcgtggaacgacattgttaagagaatatgggagaggggaagacaagatgaggataggaaggagaagtaagatcaagcgccggcggtcgcgcggggagcgaggcgctggctgctcgccgtcggcgccgtctggacggtgagggctgcctggcggcgcgccgacttggccgagcatgacgccgacccgctggggagcggagctgaggcggatgatgaggacgctgaggatgcggtcgacgaggaggagaatacgaccgacgaggaggaagcagcggaggaggagggggcagcggacgaagaggccgaggaggaggccacgctcgacgagacgctcgtgttgttcgtgaagggtgcgaccggcttggcgatgcgggcggcgtcatagaagaggtggagcgagtagtcgcttccgccgcacgtctctgcaggagcgccccggcacggaagccggcagtcgatcattggccgcggcatgccgtacgacgggccgacggcgacggtcgacccgcatcgacactcgcctgcgttctcgaggccggcgagggggtatccaaggatggcacactgggctgaagggcgaaaagagaggcaaagcgtcggataagtcagccgcgaatgaggaagtcacactaaatgacggtcggacgcactctggcagtactggcgcgacatgtaggcgctgttgtcagtccagtcggcgaggatccgcgtcggcgagtcgcgcaggcagtagtcgctgtcctgccagtcggagccggcgttcggatcaaaggaaaccggcacctgcgcaagatcctggaacaggctcaggccgtagttggccccgccgcagctctcgcttgcgtttcccgcacaaggcaggctgcaagtgttcaacggccggatcgagccaaagccactgcctcggttgattttgtttccgcaccagcattggttcgagttctcgagcccggcgtaggcatagtcgagtcctctgcagcgatcgaggcagaacgcaaccgagttggcgtccgtctggatgaaagtgccatcgaggacacgtgtgttactgtcgcggagacagagcttgaggtcggtccagtctgcgggccggaccggcgacggcgttccgctcgagcagcccgggccgcccaaaaggaaggcgggcgaaacgggggaccctgggctggcgcctctctcgtagcagagctgagaggtgttgcagagacgagggcctggtcagcacagactgggcaaagctaagagatgaaccagacgcaccaggtactggaagatgccgacgctccagcagttggcgtcggatccgaagtcgacgctggccgccgtcttgtcgcggtcgtacagggcgaaggtcggggcgaccttggacgaaatgccgtgacagttgcccgtctggacgccgccgaaacgagcagtcgagtcggctcggttgccagtgacggtaaagttggcgacgcctgtgaaggaaggaagcgcgagtcaagagtcagccggcggggtttgatcagagtgtggttgctgctgcgagcgagcgagcgaagacggaccagagacggcgacgccaaagatattgtcgggtccgctgaagacgttgtcggttacgatctgcagcggggcggtgtcgtctcgtcagcacattggccgtcgatagcgtctccaaagcgacactaacacctccgacgttaacctgcgggtggacagatgggttgagcggccaggtcagctttggtcctccacgccgacgagcgagaggtggccgcacgttggtcacatcatcgccccagatggcggggccgactgcgataccaatcttgaaggcgttgccgtcggccttgaagcggttgttggtgacgcgggtgttgcggtagtctccgctaaaaggcgcatagtcgaccatgttgacaccgccgagcgtgagcgcgttcgacgtcgtgatcgtgttgtcggtgatgaggctgccgggtgaaccaaagatgacgatggcctggtcgaaacgaggagtgagcggtcagctttggcaggcgcggggtggcaggtgcagcccagggccgagagacgcacgccatctgctcaagagagagacaggacgagtcagcgagcaggccttgagcagttgctcgaagcagacacgcaccggtcgcgtcaaagatcgtgttgcgggtcacgagcgagttgcggcacgagagcgagatgccgtcggcgatcgggccctcgttgtacgactggcccgagggcccaatctcgttgtcggtgacggtcgcgtcggagcagtcgagtcgatagccctcgctgcgagcgggcgagcgcagatagtcagcatcgcatatagcgcgagagcgatgggcgagtcggagggcgcacatgaagtggagcgagctccagccccgggtgtcaaagatctttgaccgcaggaccgagtggcccttggacgccccgccgagctcgatgagggcctcgccgcccttgagcgggccataggtgccgcgcgagccgttgaagaggaggtcctcgaccaggagcgagtcgcagtcgacgcagttcatcgagttgagcgcggtcgagatgccagcgctcgcgatccggagctcagcccgctgcgagcgagcgacggctgccccgccgagcgtccggagaccctggccgggggcggtgaagaagatggtctcctcaaggaggtagatcgtgcccgggcagaggtcgagcacgccggcgctggcgcccttgcttgcgaacagcgcgttgatttcggcggccgtcgtgccaggcgcgaggcaagaagcgtcgccagctcgacgagtgacgtcggtcgagcgacggatcatcggctgcccaccgggtcggacgtaggcgaccttgggctgcggccggctgcgatacgtcttgatccgctcggccagcggcctcgacgaccgggacggcgtcggtcgaggcgagagctgctggctgggcgtccctccatcggccctagcttcgagcgtcgaacccgcatcgctgcaggacgccgccgccgccgccgttgatggcagccaggtgcaggccaggaggaaaacaacaagcagcactggcagctgacgtcgccaggaggaacgtcgagttgctgaggacgtcgtcggcgtcgatcgtcgagtcgcggacgcttgtccggccatcgagggcagagagctgaagggggcagcggacgagcgctgggaaccaaggggacagagagggtcgtggttagcggttgtccagcgggtgggagcagccgtccttctccagagaggtcgggccccatgaggaggcgaggacgagacggggatgaaaacacgaggcggacccggcggctccgagcgcagatccccttttcctcgccggcgaccccagcatgaggtcgtagtagtcgagaagtcggccagcagccgtctcgagcacgtccatgtcagagggaaagctcctgcatcgagctcgacagtcgactcaccttgaagagcagctcttgcgaggtgagggctgcaggaaagcagacacgcgcgatcgtccgccgggaccggccgaggtgtccgtcgcctctgcgcgacaccaaggatgatgccgagtgtcttcaagatggatagcaaagaggatacagccgacgtctgagtcgaggtcctgatctttgtccggcgagaggggcggccgggttgggttgagggaaggagctggcttaagctggccgctgctgcgcgtcggctcgcgcctctgccgtctgtcctcccagcgagctgactgcccatccgaccttaccctcgctcgcaccttgcacctccttaccctacccaggtcggtcggaataaaccgcgcggtcgaacaacatgctctcaaagagatgcctgccgtcggcatccgctgcgggaacccgtcgagcctgcttttccggtccgtcgacctccttccgccacgctcctttgtcctgctcggcccgcagcagcagcagcagcctcgacgcccgtcggcaggccagcacgctcatcgcccgtcagcgtcgagctcttcagtcgcatcgtctatcagccctcctttggggtagttggcctgctgactgaccctcgttgtagcgtgcccaggagctcgcagggccatcgctctcgcgctcgtcgtcgacgctcctctggtcggcgcagcccaaggtgcgttgtggccccggccgtctgcaagccttcgatcttgccccctgaccggctgctctgccctctctgattggcagctgtcgacgacgctcgcttgcggggcgcccttctttggccggctcaagcttgagcggccccgggcaggcccggacgttcctgggcttgttctcgtcggccaagaaagccgagccgctgtcgaacgtccccgtcgaaatcatcgctgcgccgaacgaacgcatgcctaacttcgtgaatactgtccaagtcaattggaagaaatgggaaagcgtgaggctcagcccttgagtactgcagcgcggcctcggaaaactgatctcctgtgttgcctcaacaggacgtcgacttgatgtgctgcctcatcggagggtcgtctacgtttacgagaaggtccgcggccttcattctcgttgtcatcaagctcatctctgctcaccgactgctcctttctcgtttcgcagccggatgacctccaatgcaggctgacggtcgtctgttccgacgtttgcgcaacggtcccaaccccgaactcgctccccatttcctgttcgtcttcgttccaacttgcgtcctttctcactcgaatcggtccctcaactgacgacccgtgcttcaaaggccattccatgagttcatgggcccgatgaagttcatctcccgccatcaggcctcagcatccggcccgagatttacgcggctatcctgagccagtaccttcggcttggggccttcaatccagccaagcccgccttcatcgccggtcggacccgccccgtccatcccttcgcctttggtccgccgaaagatggtctcgctcccaaggcgaagctgcgcctgctgcggcgcttcgtctttccgacgtacaagtggacagccctggtcgcccgaaggcaccgcatcgaccggccttggcaagtgattacttctatgtggccaacgacgattcactcgctcagagcgtcgaacagtagcaagttcataacggagccaccgccgaacgtcaaagatattgtcaatcctggtccaattgacatctgcgcctcggagatccagcctacggccttgcctctggactcctttgactttccagagcgcgaccccctctactggacatcccccaatatactcgtccgctcttctgttgttgtccgaagcgcaagcaaagttactgactcatttgaacccgcgttcgctaccgcttcagacctccatcatcagcccttggactatgcctaggcacggcccaaccaccgtgatgacgtaatgaacgtgctaaccaaacaaaagaacgtgagtgcgacgatcgcgccaggcaagatcgcaggaggcgagaaaacgctgatgaccccccaactcgagctctgcaggccgagcgccgcctacgcaggctcgaattggaggcccagaagctcaaggacacagagcgagaggccgagatcaaatggaaggaggaagaagccgcaaggcagaagagcgaggcacaaagagcgcaggccgaggtgactcttggacctcttgcctgtcaaccctttttaccgctcagtttctgacatccttgttccacacggacctcgtcaggaatgagccccgtcaaacggcgcagcgcgatgaggtccgccgcccggcgccttcgattgcttagcctctgccctccctcggccccgactgcaggcaacactcctcgattcgaacattgtcgacagggttgcaggctcctcgcggatcggtaagtggcctgtcgacggactaagtcagccgaccgccgcctcgctgcccgggcgaggctctcgccgacagcatagaggcaagcttcattctaggccggccgcgagcaaatagtagatgagattgagaaaaattgtgtacgagatacagtggagggtccaggagggaggagcagcctatgcctcggcatggtgaccgccctcggccatgccgcgccggccgcccatgagctcgacgagggcccggatgtcctgagaggcagaggaggcaagtgggcggagtcagtacaaaaatatttcgagcaaggcgccgagcaggacgcacccgccaccagacgctcttgccgcgccggttcttcatgtcggtctccttgaggacgtcctgcaccggggcaaagatgatcttgctgccctggatcgtgataacggccgcgctctcaggcacgtacgtcgacgtcgggatgccgcccgagagcgtgccccggcgcttgttggcaggcatgccggccgcagcactgccctcgcgcggcgtgtggtgctgctcgaggaaagcgatgcaccggctcgagagccggacggcccgcgcccggtcgagcggcgacgggatgccgccctggagggtgtggccgagcgaggccgagcgcgagtcaaagagctcggcaccctcctccttgagaatgttggtgatgagctcggtcgtgtagaccgatgacgacttctcgttcctgcggggaggaagttgaggtcgtcagctaagcgcgccatcgtgcgagcttacgaccgacaggcacgaaccggatgatcagccggccctcgctcttgcccttctggtcgagctcgtagcgccggcggaggaagcggacgtcggaccgcaggaggtcgagcgagatgccgacctcgggcgtgtagacgatgacggcaccgacggccagggcgccgagggcggcaatgtaaccgcattttccgccggccgtctcgacgacgaaaacacggttccggctggccgaggccgactgcttgatggcgtcgcaggcgtcgacgagagcgttgagcgacgtgtcggacccgagcgagaactcggtcagcgggacgttgttcgagatggtcgccggcaggtggaccatcggaatgtggaacgacgggtagttggcccgggcctgctcgaggatgacgagagagttgtaggcctcgaagccgccgacgaggaggaagccgtcaaacgcatacttctggaattggagcgcgacgtggccgaggttgacgtcgggcagcgtccgattcgtgccgagctcggagccgccgcgcgtcgtccagccgtcgacacgaagccagtcgagctcgctgacgttgtcctggagcaggccgttgaagccgttgtagatggcgacgggcgtgtggccgcgcgacaagcagtagcggacggcctgccgggtggcagcgttcatgccaccggcgggagctccgacactgcgagacggggcgccgtcagcagtctgcgacggagaagttgaaacgtgcgcaggaggaacgtactggacgataccgatccgcatccgctcgttgaccggcttgagcttgtcgtggtcaagcctcgacgaggccgcaaaggcgtcgagcatgtcgataaactcggcatcccggagcgagagcgccttcttgaagtcgcggtcctcgatcgcctgggcgacagcttgcgtctggcaacagcgagcggcagaaattgttagcaggggcggcccgagcggtcagacttgcgctaaggctcgacgcacgagctggacggccttctcgagcgggttgcgaacaatcttgttctggacgatgccgatgacgtacgacggcgtctcgggcttggcctcaaggacggcgttgacggcctcgacaccctggagggtggcgaggatgcggtcaaaggcgcatggcgcgccaccgcgctgggtgtggccgagcgtcgtgacacgggtgtcgagcccgagccggtctgtcaaaaccgtcttgatgtactcggccttgatcggcttgaggtttcggtcgagcgcgccctcggcgacaatgacgattgacttgcgcttgcccatccggcggtggcccttgaggacgtggcacatggcgctctcccagtcgtcatccgccggcggctcctcggggatgaagacaaagtcggcgccggtgctacaggacgaagagctcgcgaggtcagcagcccggccccagagtgaaaaggcgcatgccgccagacggacctgactccggcaaggagcgcgagccagccgcagtgccggcccatgacctcgacaacgaacgcgcgcgagtgcgacgaggccgttgacgagatcgagtcgatcgactcgcagatgcggtgaagcgccgtcaggccaccgatcgtcaggtcggtcatggccatgtcgttgctgtagagcggggaaggcagcagaaccaaccggtcagcaggctgtcgacaaacgagagcgcacgccgaggttctacgcactcgatcgagccgacgaggccgacaatgttgaggtgggcgtgggcctgagcctgggcctccgagatctggccgtcggcgaggaggacctcgaccatggacggccactcgcgccggaggaagtcggcaccggtgagcgagccgtctccaccacagacgacaaggcagtcgatgccctgctcgatcaaatgcagcgcagcaagctgacgaccctcgggcgtgcggactgtgtaaagcgggagaggcgtcagctcgacggtccgtttcgggatagtatggcgagcttgacgcacaggccgcagagcgcgccgttccaatgagagtaccgccctagacagaggcagcgaaggagagccaaaggtcagtcctagctgctgacaggaagagacgccctgcgcaacgcacctcgccaagccatccgcggacgtcgtcccagccgacgcggataatgtactttccgccgtggtggtcaacctcagcctcgggctgctcctcggccgtctggttgtcttcgtcttcgagcgagtcgtagacctggtacttgaagagctcgcccgagccgaaagtcagcggctgcgaggcgaggatgccatcgagcgcgtcggcggcagggccgtcagccgcagtgccgaacgacggtgccggcatcgggacctcgtcgacgggcgtcgagggcatcgtcttgcctgtcgagggggcgttaccgcgaacgagaccctcccaaccctcacggataacgtaggtgtggcagccgctaagaatgacagagagagggtgaggtcagtctcgaccgccggctcggcattgtgcctgactgaagtgcagcagaacgtcgtgctgccgcgaaatgcacaggaaacgcaccggctgagggccatgcggacaaccgaccggacggcagcgttcatgcctgacagagcaggacggagaggaatcgtcagctttcctttgcagtctgacagcaggcgcgagagacagagagccaagccagcccagggaggacgcaccggccgagtcgccgcccgaggtgaggacggcgagcttgcggggcggaccgccctcgtcgttagtcgcaaagatgcgcggcggttcgatagacattggaggaccagggagggggaaggaggagaaggaggtgttggttggtcggacgaagaggagctgaaagtgcgtctggctcgagctctggcctggcctggcctggctcggcggctcagcagggcgcgcgcgggcgagagaaagaaagaaaaagatcgactctccgcgtcatcatgtcactgccgccggcagttgacgcgctgcctgcgctgcctcgacgactgaaggctcacgagtactgctgtgcagtgagtgagtggcaggacatgctcatcgacagatggcgctggccgtgcgctggaggtctgcttctcgccgaccgggcctacctccggcgaacgtctgggctggccaggacgcgcgacgccgagggcgacgccaggctgtaaggcggcggctgcgaggccgacccggacgacgacgccagaggtgcgacccgtgctgccgaggggaagacgaaccggcagagggcgttgcctcgacctgcgaaaacgacgccggcgccggcgccgactagcggcgagacgaccgagtgagcgagcgacgacgcgatcgtcgtcgcccggccgctgaacgcacggacgcgagcggcacggcgccgccgcctgagagccgatgcttcgcttgacgcgcggccggtgctagaaggctggtcgtcgggcgaagcgtcgccaccgtccagaggcgccccttcgcggagggtgtccaggtcaaaagccgcaaaggcgaggtcgcggccgtgcgagggccgctgattgtcgatctgccagatccgccagcgggcagaggagctgccgagcgtcatcgaggttgtcgccgagagcacgctcgacgcgtcgtcctgcgacgagccagagcggccgatccggccgacgccgacaatctggccggagtcgagcaggtcccagccgcccttgcggaccgagaccgagccgagtaggacggctcgcagggtcggagacgaggcctttggcgagccgtcctcgggcgagctgctggccgtaaagggatcgtcgccgtcgaccttgacgtcgtctgggtcgagcaggagctcctcggcctcgccccgcttgtccctcgtcgagagccgccggctgtggacgccgtggccggcgatgggatagtcggccgaaaggttcgacgcggccgagagcgacgtcggtatccgccggtggagcgagggcgagatgggcgggacggcaggcgagtagcccgacccgcggccagaccggtcgacgagcggcgacgagtcaaaactgagccggtcgaggcttgttcgttgggtcgacgagctcatgctccggcgcattgccgggcaggcacaactggctgccgcgaccgagtcgggcgtgattcgatagaccgtcgcctcgtctgggtttgatgcgagcaggagaaagccgtccagcttctgacagcagccgacgcactcttgcacgcccgggtcaacgagggcgacccggccgagtcgccgcaggttcggatcgacggtgatcaggcgcgaaccgcggccgtcccagagcgagatggtaccagtcgtcgtcgtgacagcgaggatatcctgggcgagaccaccaatgtgagctttggtcgatgcgatcttggagacccgctggccagagtcgatgtcgatggtgacccgttccacccaagcctgcgagccagcatcccgccgcaggacgcggacctgaccctccgaggtggccagcgcgaggtcgattgcggagccctcagtcgcggaagccgaccagagcggcgtggcgcgcaatgctttcatcgacgacgccggccgcttaacggcgatggcggccttgcgacagttgacttcgacgagctctccgttctcccggacgacgacaagggtcgctgccggtgcagagctagagcccccgctcgggccggccaccgatggcggcaagaatgcgatgctcgagacggccgatgacaggccgcctggtgcggccaggcaaacaaccagagtcggctgggtgaagcgcgagccgagcagccagatgcgaacagcgcccttggccgtcgcgaccgcgcagtagcgtcccggcccgtcaagcgcggcgaccgtcgcccggtcggtctgcagatcgagcgggagcggcaggccctcgtccgtcgggtcgtctcggctccagacgagggcgatgccgtcaaagccgatggagaggatcttcgtcgccgacgtcgcgaggagcaagatatcggcctggtgcgccgtcggcagcgtccgaagcgttggtcggcgatgtacgtcggccgcgccgtcgagctcgtcatcggtgtcatcccactcctcgccgagctcgagccggtcgcgctgggcgtcgagcagctcggcatccttcagcaggtagcggagaatgacgtagacgatgaacgtcgtcgccgcgatcgggagaaagacgacttggaggaaccaggcgatgggagccctgtcgctgaagaccgaccggagcggcgcacggaccgaggcgaggtaggcccctggtgacggctgaccagcaaccgttgagacgacgaccgcgatcggggcaggcagcgtcaggccgaccgagcgagcgccgctcgggttgatgtgtcgccagagcggcgttgcatcgagcgggccgtcacacgcgagcaggcggccggcctttgatcggaattcgaccacaccgggcgcgacaccgagaccgcccgagtaaaagtaccagagcccgagcagaaggctcatgagagccatcaggctgccgttgcgagcagtacgggcccggaggatggcctggaagccagagacgagaacctcggacgacgacttcgtcgcaggcttgcctctccgccggcggcgtggacgagcgtcggcctcgccgtttgtcgggacggaggccatagagaaggtgctgtcggtggaggcaacaggagctgctggcgcgccctgctggaggacgtcggcgagctggcggggcgtgtggcgtcagtcagtgctgtcaaatggcagaggcagcgccgcgacagcgcacctcaagccgctgcatgtcgatcgagatgaccgtcgtgaaaaaggtgaagaggaggaaccaatcggcgacgaggacgatgatggcgaaccggcagaactcctgccgcagagagatcgaggcatgctttcgggtcagccattgacccgtcgcaagattgtgcgggcgcaggcataccttgacgacccctgccgtctcgccaagcaccatgccgacgagaaagaggattaggatgtcggccagcgtcgtgaatgtgatgcgtgggccggcgtgcgcaagtccgagtccgagcctttcacggactgtcatgtggactggcgtcgtgacaatcgcgttggtctacaggcaaggatcattagacggtcaacttggagcagcagacgtatgcgggcgtgggacgagcaaacgcacgacgtggaccatgttctcgaccccgacgacggtgatgacgaaaggcagaaggtaccagggcacgccctcgagcttccagccgagcatgacgcagagactgccagagcaggtctgtgaaggcagacaaggaatcgagcactatcagcacccgccgaccggtcgggcctagagatggcacaagcggctcgtcactcacagtactggcggcgagctcgacgacgtaggtgaacgcgacaccgagccggttatggacctgggtgaagcgctggagcgagcggaacgtccagacgaagaggactgagtagagcgcgaggatcggcactggcaggagcgaccgggcgagaaagaggaccgggtgcgagggctgcgagcgggggaccgaggccggcgagaagggagacgcagaactcgtgtgcggggtatcatctggcggcaggagcgcgttgcggacctcgtgccgagtcgttgccgcggctgaacggccgtagatggcgtgaggcgtgttgtcgagagcggcgtcgatggcagcgagccaagcggcgtcatcccaatccctttcgccgtcagatggcacgccaaagaggcagctgacggccgtccacgggccagggtcgcccgtttcaggtgcaaagcagtggacaagctccggcagcgaggcattctcggccatgagccgtctcgcgagcgcctgcgcgtcaggtttcgaggcggccgtcggcggatcccgcaggtcggcgacgtccccgacccaaagcgcctcgagccggacggcgaggtcgagctgctcgagcgagagattactgtcggagagggtccagccgtcgaggccatcgagcccgctcgggccggcaggccacggaaagattgctgcctcggcctcggctgcgcggcttcctggtgagaagagcggccggaggagcggcgtcctcgcgagactcggcggccggtcggtcgcgctcgggttggcgctcgcgctgaccgtctcgtagtggatcgcgagggccgggtagaggagagttgtcatgacaacgctgcagatgaggaggacccggatctggttggcggcgacgtgccggccatggagggcgaagcaggtcgcgagtccccgcctgaccgtgtagggctcgatctcgcctgtcgggccgacgtgcggccgggcgagcgccgccttgaacggtatcggcaggagcgagagaaagaaggcggacggcatggccggccagcggaccaagagacaggcgagagcccgctcggtcgaggtaggcagcgacgggcggaggcagacaaaggcggaggcgaggaagtgacggtcgtgatggtcaagccgataacgacatgtcccggcggaggggggcaacgacagtcggtgaggagtcggcgaattttctgcctgctttgaaggagtgatggcgtcggtcgggccagagtcgtcaaagccggatcagtcagggcttctggctgccggctgccggagggagccggcggcggcggcgcgcgcatgagagtcggacgaggtcgagccgccgacacgccacgctggccgcagaaagacgcacctgatggacgaaaggccgatgcttgagacgtgacgattcgcaggcgtctcaggaaagctcgccttcaggttggacgagcagcgagcgactgagagatggtcgcgacgacgagcggacgaccttcggagcaagcggctgactgctggcgcctgggctagggttacggccgctgtgccctttgcttctcagcagcagcgcgcgcgcggtgagctcgtcgttcgagcctgctctccttactcctcaacacctcccctaccccctctcaacagcctctccaatcatggccggcatgtttcagcgcgacccgcgcgcaggtgcgtctccagtcgtgtgtgctgaggtcgtttgtgcttgacgctgactgctcctctgctacccgcgtctctcccccgtcgcatcgcccacgcgccgcctgccctcttcacgccgaccacctcgccttaggtcttttcctcggcggcgaccgcgtctctggcgccgaggtccgcaaccagaatggtgcgacctgggccggtactcgattgaacttgccctcggtctctgacgctctgcctgtccattccgccgctgccagtcctcgcagcgcagaccatcgccaacgtcgttaagagctcgctcggcccggtcggactcgacaaggtgcgcttgcgtctctgccgcagacttgctaatatgcgtgtcactcagctgacgtgaggtccgaccgcctgcagatgatggtcgacgacatcggagtacgtcgctttgcagctcgacagcgagcgctgccgaaggctgacccgtgcgacgtgccctttgatcaacgaccttgactgccaggacgtcaccatcaccaacgacggcgcgaccatcctcaagctgctcgaggtcactcaccctgccgtgcgtctccgagcgggccggcagaatctgctgagagcgccacggctgactcgtcggctcctcctctctagggccgcatcctcgtctcgctcgctcagcagcaggacaaagaggttggcgacggcacgacctcggtcgtccttctcgcggccgagctcctccgtcgggccaacgacctcgtccagaacaagatccacccgacgaccgtcatcaccggctaccggtgcgtcgttctcgagagctcggcggctccccgagcaaaggctgaccgcagtcttcctctgtcgactgcaggctcgcatgcaaggaggcgtgcaagttcatgctcgagcagatgtcgacgccggtcgccaagctcggcaaggactgcctgatcaacattgcgaagacgtcgatgtcgtccaagatcatttctgcgtacgtcttgccgtcggccgcgggcgggcacctatgcgaggcctttgtttgactgacgcacccttcgccttttgtccgccctcagcgacgacgacttctttgcgccgctcgcggttgacgccctgctcgcggtcaagacgatcaaccctcggggcgagaccaagtacccggttaaggcggtcaacgtgctcaaggcgcacggcaagtcggcgcgcgagtcgcaatttgtccgcggctacgctctcaactgcactgtcgcctcgcaaggtccgtcttctgaggactcgctgggcagcttctacgcttggtccgagctcggctgacgtctcacctctgttgctcccgtcatcgccccgcagccatgaagacgcgcatcgtcggcgccaagattgcgtgcctcgacatgaacctgacgaagcagcggatgcacctcggcgtccacattacgatcgacgacccgtcgcagctcgaggagattcggcggcgcgagtctgagattacgctcgagaaggtccgcaagattctcgcctcgggcgccaacgtcatcctcacgacgaagggcatcgatgacctctgcctcaaggagtttatcgaggcgggcgcgatggccgtccggcggtgccgcaaggaggacctccggcggatcgccaaggcgagtggcgcccagctcatctcgagcatggccaacctcgagggcgaggagacgtttgagaaggagtacctgggctacgccgaggaggtcgtccaggagcgtatcagcgacgacgagctcatcctcgtcaaggggaccaaagtcgtcagctcgagcagcatcatcctccgtggcgccaacggttcgtcggcccttaggctttgactcgttatcacggcccgacccgacccgccgctgacactcttgccctctgctctctgcccggcagactacatgctggacgagatggagcgcgcgctgcacgactcgctgtcgatcatcaagcgcacgctcgagagcggtgccgtcgtcccgggaggcgccgccgttgaggctgccctgtcgatataccttgagaactttgcgacgacgctcgtacgtcaaggcgctcgcttcgttcctccccgcatgagctcggctgatcatcgcttcaccctccaactcgcagggctcgcgggaacagctcgcgatcgccgagtttgccgccgcccttctcattatccccaagacgctcgcgaccaacgccgccaaggactccaccgacctcgtcgccaagctccgggcctaccacaacgccgcccaaacggcctcggccggcgaccccaagaaggcgctcatgaactacggcctcgacctgctcaagggcgaggtccgcgacaacatcaaggcgggcgtcctcgagccgacggtcagcaaagtcaagagcctcaagagtgcgctcgaggctgcgacgagtctgctacggattgacgatggtctgcctcgccctcttcgcttggctgtgtggtcttgccgccgatcactgaccccttcccacgcgcccatccctcccacagccatccaggtcgcgcccgagcagcgcggcggcggcggcgacgacggccatggacactaggtcgactgtcggccgcaagaaaagcggggaagggacctcgcctagatgtatgaccatccacacgcttccttcttgtgtgagcggtccatcgcgaggcaggctcgatcgtcgacagatcgtcaggggtcataaattcggaaggagaagcagatagctgggatctacgccgctggggaggtgccatcgggcgacactacaggtgaggaagccacctcgatgggccggccgagcgtttgagaagggccagacgtccgtccaccggggctggcatccccctttgaccggctgctcgctcgtggccatgcgaacgggagcttgatgggcgatgacggcgccgaccgaggcgagcgttcgccaccgacgtcgagcaacggcagatcgactgcggtaagctgccgcggcgaagaggcggtcgctgctagcggcttaacgggagaagagggcgagtcgctgccgctcatctcgtccggagcacggcggaggacctggtcgacgagattgtgcagacgttgtttgggcttgggaggctgcagcggcattggaagtcagtctctcagattgttgaaggcaatgcgctggttgtcggagggaggacgaacctcatcagagtcgtcgccatttgtctcagccgcatttgcttctggcttcagtaggcgctcgacgcgctcgacgagctgcttgaaggcgcgcggatgggccgcttcctctgcctaaagagtgaaagaggtgcgtttcgcgttagtgcgaccgcccagctgcctcattctccgccagaactcacccgcgagtcgtcttccatgtcggcaaacgagactgtgaccttgcggggaagtccgtcgccgtcagtctggccctcgtcgagcgtatcagtggtggacagctccagtggcgagagctggacgatatcggccgagacaggggtgatgtgcagaagcggcttgtccttgtttgccgacgaggtccagagccgatcgacgaggtcctgcaaacctttgggatactgaggcattaatcacgtcaacggctgccctcggtcggcggcaacgcccggcaggcacgcacgtattgcggcggcagcaccgtcgcctgacggccgtttcgccggtggagaacgagcgagtcggtccgaaagcatcgcgggctgccggccagagtgcgcccctctgcccaaacgcgtccgcaaaggtcattgaagcgttgagctttgaggggtaagcgaaaggtcagtccggcgcctgcttgcttgggcaatgttgacgagacgcacgacgctgcgagtggactgcgagaatgatggccgtcaaccggctaaagctcttgacctacagagtttgatctcggactcactcgcatggcccgagtcctcccagacgacaagttcggcgtccggcatgtgcttcttgactgatcgagccgagagagcgtcggcgtcagcgtagcattcgactgcaggtcaatttaagcaaacggccatacgattcgtcgacgagtcggtaggtatcaggtggtcgagggcgcccgagaggatcaggaccttgcgcacctcgtcgttgatctttttgaggtcgccgttcggaacatgatgggtcgtcgtcgcaacgagctggaagaactggccaagcgactgcgtcggtctgcaaagaccgaggaggctaatggatcagtatcgaacagtcgactgacgttgccctccggccacgtacgtgagcttcatgcgatgcttgtactcggcgacgcgggtttctcgattcgtgcgcttcggctcggcgtcgtcgtcgtcatcgacctcatcaagccacgcctgcgggtatagcatactgacagtcgggagacgtcagccgattgcccgagtcaatctggcaaaggaaagaccaacagcatgtagcgctcgagcgcatctgcgtcaaagagggtgcgcgcagtgatctccaagccgtcgagctgcggaaggcagtcgatcacggtctcgtcagcaatctggcggcgaccgtgtgcggatcaatctcaggcacgcaccgggggcagcttgcgccggatgccatgccctgctgaagtgacgccgaggacgagagaagcgatccggttgggcacgagcgccgccagctttagggcgatcatgcctcccatcgagacggcaacctggtttgagtagagaagagcgaaaagctcctcggtcagcatgaactgtctcacaaacgacccgccagcgagttctgtcctagacgtacgacgtgcacccctcgatcctcggtccagcccacgaagtcgaggagctcgatgacctcgcgcgccatcccaccagtcgtgtacggtccccggggcgtttcgctgttgccagatccgctgttgtcgaagacgagaatagatgtccgtgggtcccggccaaactgctcgacctgccgatgaattgtcagcctccggctcaaacagggagagaggtgcgaagggttcgagacgcacctgccgctgccagctaaagctacagttcttcatgcccataatgaaaaggacatgctcgggtccactaccatgtacctcgtagtacagcttgtgtgacgcaagatcgccttcgacttgagcgaacctgaacaaggagagtagaaggtcagcatctggtctggagctcaggctcaggagcggaagccggccgaagcgagcaaggctagcggtgacgcaccccctccgacggcaagtcgcgctgtcaaagacggtgtcgggcagcgactctgtccggcgctgatcctgtggcgctgcgaagggtgtcaggagcggcatcgacgtcggacggtcaagctgaggtcgtctgccttccctccgggcgtcgaggcgcagcacgcctcggcgtcttggcctcgtcggcgcgaccgaacgagcggtcgagctgtctgtcgaccaccatcgcctcccacaccagagcaccagagccagagatgtcaagctacgagagtgcgtcctagacttacagcctacatctccatacagcactcagatttgatacttcggctgtgccttcctcgcgccagacgaacatcccgcttcggccgagcccgacggcgcctccgagggtctcagcctcaacgagattctcgaggagcttcacgagactggcggcgagggcatcgtcttcgtagacggacagggcaggcggcttcttggcgagggtatcgtcgagctcatggctggccagcttggacggttcgtctaccatggctcgctgggtcggagcaggccctccacgtcggcggccgctgcagggcggttgacgcatgcgactgacgctctactcttcgattgtcatcagcatcaaaggtggcgcatcggaagagtacatctcgaagctgccaccagccacagtcggccgggtcaaggagtctgggggtgagtctcgcacgtcaggcatgctcctcgcgcactgctagagctgacgcgacgaacgatgcgcggccctgccaacaccgcagaggatgcatgctccatatgccagacaaagttccagatcctactagacgaggaggagcagtttctcgcgctcgattcacctggttcgttccggtagagcatgtaggctcggcccagacgtcgctgaccgccgcgcctgcttgcacttgataccgtttgcctcagcgatcgcgactgaaaacctaggcgtcgtccggatcggtcgctcgtgtgagcatctcttttgccggcgtgatgcctcccgctggctgagcaaggtccgctgcgatgtctaccactgcaaagcgagctccgctgacggcatgcctctgctccagtccaactcctgccccctttgccgctcaatctgcgacccggcccgctcaacgccggacgacacatcaccgggtgccagcgatgccgcaccagaacagaccgctggcggcgccactgcgccagaaggccagcagacgccagctcagatgatgcagatgctgcaggacttgctggccggaggcgacttcccggccggctttggcgagccatcggcccgggaagagagccgcgaagagtactcgtcgatgtactcctgagcgatgtgatggccttgacgatgagctctatgactctcgcaacgaaatcgagagcggagactcggctgctggccacccgcaccgaagaaacccagccaggcgagcaggttagcccgcggtgtcgctcagtgcgcctcactacctcccgagccttggaaaaggctgcaaaggagatgtttggattttcgatacacagtgcgtgcggtacaggcgcccagggacccctctgttccggccggctaaagtcgccggaacacgcccctccttcctcccgatctctctcttcctccggatgagtgctggaccccgccctgctctacgatgaggctgcctcctgtagggcgagctctccgagagggagcgcgtcgtgccccgacggcagactgcgaaagccggcggccgccttacatgggaaccatgcccatctcctccggtctgcggtggaagtgcgcagtcatgaaggtcaggatctcgaagggggttggcaggagctgggggccattcgggtaccacatacgtcagggtcgtcgactcgatcatgacgccgaggccgagcttggcggcgccggccttcatgtggtcaatctcgccggtgacgaggaaggagaaggtcggggcaaagcgctgctcgagcagcatcgacgtcttgccggtcgagtcgacctggccgcggaaggtcgccatccggaagtcgtacttggcgccaacggtggcggtcgcctcgcgccggccgccgttgaggacgacgttgaggtcggcgccaacgtcaaccttgtccgacagccggtggtggtaggtcgccgcgacgatgccggccgcctgggcctgaagcgtcgccgtccactcgtggaagggtgccgtgccgttgggtgccatcggcgtcggcacgaggctgcccggcgtcagggccgacgtccacttggcgaggagagacgtcaccgactgcgagatctcgggcgtcggcttctggagaacattctcaaagccgagcgagaagcgcggcgtgagcgcaacgagggccgacgtcaggtagatgccggtgccgtccgtcagcgaagggttgatcgccttgaggttgatcgtctcgccggggaggacaaactcctgctcgacctgaaccatcgagtggcccggaacgggcgagagctggaagagagactcgggtagagatcagctccggagccggccgcatgatcgaactgccagacgcacctgagcctggaccttcgaggtcgtccactcgttccacggcttgttcatccgggccgacgagttgaactcgttgtcaatgctgccctggaggaagagctggaggcgagcgacggacgcggataacgcagacgggactgtcagcctccaacctgacgcgagcgagccgggcaacgtaatgccgggcacgagagagcgagagccgacgcacgtctttcttcgcaaagacggcgccaaagttgtagctcggcggctcctgggccttggcgagcgagaacgagtgctggacctggaaggccgggtccatcgagagcgacttggagaggtcggccttggctccgtcaaaggtgaagttggtgaggtgggtcactggcaaagaggtgggcggcggtcaacgaccgggaccacgggtgcgctgctggtcgagagcggcgggcgacgacgacgacgatcgccgacgctagagtctaactcggaaggcgacgagcgccttatgagctctgccctaatgagaacgcactcttgacgtccttgccgagcgactcgaccgagcccgggttcgcgacctggccaaagagctcgttgcgcttgccgtgcagacggtcatactggccgaggatggggtcggcaaagccagagaggagcgaggtgacgcccgagaggtacgacgcctgggggaccttctcggccagaggcgagtacggagcgggctggagcgggaccgacatggcgaaagatgggtgaggttgtgggtaagaggggctggctagctggctggctggaggtgcaggtcgagcgaagtcgtcgtgtcgaggcggagggccggccgatgcggaaaacgacgggttacgcggagcgtaaaccgcgagcgtaactcccgcgactgaccgacggcccgggctcgaccgccgccctctggcgacgatgctgcccggcgagccaggaatacccacccgccgttggaccgtctgacgctcatcctttccttgactctccttacctggcagacctgatggccgctctagcagaccgcaaatcgccgccagtgctgcacccggtccggtcgacccctcgaggccgcttcttccggccgacgagacacgagtttaagctcggccagccgggctcaagcgaccgggccgtctacgactcacgcaaggcaaggaagggtgcgagaggcctctgatagctacatcttcgtgactgatgtctccgggtcggttgctgacatcctctggctgccaggccgcttcccgctgcgcgagcaccaccacgctcagctcccgcacgcgactggcgcaccgcccgtcgccctccggcttgagtaccagctcgggtcgcagaggccacagctccgacctcacctccgcgccgacattaccttctgggtcgccttcttctttgagctcgggagtctcgtctgggttgcgaacggtctgtccgtcgcccgagcgcacgactggctacatgacaagcgcagcatccgacggctgacccttaggtcgcctgctcaggcttctgcgtctggctgccgatcgagctgccaaaatacgagtcgacaacgctcagccggacggccgacgccctcggctttgttggcggcacgctgttcctgatcggggcttacttgggtctactcgaggcggccaatcgagggctcgagctcgactgtgcttcccgttcagtgagctcgtttaaatgcgtgcacttgctgatctcctgctgccttgcacagtcggcgcagaggccgaagagctgctctgggggcgtccatcggtcacgacaaagaaggacagcgatgaccggtcgacaccgagcgacaagactgacgtcgagggtcagcacggccggccaaagctcgagtggcagtggttgtgagtcgtcggtcgtcacgcttagcaagaggccttgctgacagacacctaacggtcgtacactaatattgtcaggccgagcccgcgctggagagagctcggctacctgagcgcggccgtccagatgttcgcggcgacgattgttcgtttgccttaaggatcgacctgcgctccgaggctaaccttttcatcttcgtttcggccgccagttctggatcgcgacgctcacagctcttccgggctttatccctggcttcttcgaaggcggaggtagcgagcccatcatcgacgtcttcttctggctcccgcaggtgatcggcggcgtcggctttgtcgtctcggcctcgatcctctgcattgaggtccagtcgcactggtggcggctcaagccgctctcgctcggctggcagatcggcttctggaacgtcgtcggtgccctcggcttctttctctgcgggtcgttaggattcgcgcactcgagcggggccatctaccagagcggcctgacgaccttctggggtgcgcccacccacgccggctcgctgaaggcaacaggctgactctttgcgacccctgacacctgtccaggctcgtgggctttcctgatcggctcgacgttccagatctacgaggccctttggcgagagccgagcaaggataaatgacagcctgctccctacgcgggatgtcctcgataaagagagaaaggcatggctgagatgcatcagacgtcactcccacgcctccatcacaagctcgtcaccggtcgagttagaattgtgcgaccggcggctgccggccgagccgaccgacttgactggcgaaggcggcccggcaagcaactcgatgacgctgtcgtcgatcccgccgtcgtcggtcgagggcgcagtccggacgtttcggcggcgcgaggatgaggtcgtcgcgacaggcgactgcgacttgagtgccgaccgccgggccgggcggcgctgggaagtggtggctgcggcggcagtctcccgctgctggatttccgcgtaggccgcgacggttgcgtaaggcttgcctgtcttgggatccttgtagcgcgtcggaaggccggtgatgacgcagacttcgcgctggacggctgcagaaaaggcggggcggggttttagtcctttccggcagtcgcgcgagcggctcgagtgataggacatgcgttctggcggcggctggccccaatcgacgtggtcgccaaacaggagggccttctcggcgcgtgatgtcgacggcggatgcgagagatgcagatacgtgcgcgccgtgcgaccgtcgtcgtccgtcaggattgtggaacgagggccctcgattggctcgtcgtccatgtctttttgatgcggttcggcagttgcctgagtcttgcccttgcccttcgatcccgccttcttggcccggggcgtctgctcgttggccgaccgctcctcgtctgtcatgagcagcatctcctgctctggcgagcgcgaggcgctctcgctcgccacgctcgccgcgcgacgctgctttttcctcgaaggcccaccctcgacgtcatctggcccgccaccgacgaccgtgatcggccggccggcctcgatcgaaagggtcgtcagctttggcccgcggaggaccttgggcgccggtcgccggccggcccgcttcttctcctcatcctcgagccacgtccggagctcgtcgacattctcctcctccatctcgagcgcgtcggccagacgcttttcctgggtcaggcgcgcttgcgcaggcgcggccctgggctttggcttgggctagaagagggtgtggcaggatgcacggtcagtcgacgcagcgcaggcaagcacaacgtaatctgttcgcaccttctgaatgcgagtcaaaggcgggtctgagcccgacggtacgccgatgtgacggtaaatcgagttggtcgtcctcggcgcccggcgacgaataagcatgtcggtatccggcggcggcggcggcggcggggcagacgctgaggttgttggcccgccgcgcgtcctgcgacgctggggcctcttggcctcctcagccacgttgacttcggtctcttcgccagacgactgggcagggtgggccgcgaccgttgagtgtgcgagcgatccggccggttccgagtcaacgtcaaaggtcgagcgcatcggcttgcggatcgtcggcttgcgcttcttgagatagaagagcgatgtgtccttcttctgaagagcagaacgaggttcaatgtcagatcggcgacgagaggaccggagccctcgatagtctctcggacacgcacgcgtttcgccgcccgctcgtcccgctgcacctgcgcctcttcgtcgtcgtcgtcgccttcgtacggccgctcgccgtcatcgtccgagtaatgagcggcctcatcatcaaggtcttgctctgttacggcatctgtcgctggcggttcactgtgcggcgtcagctcggtggccggccatcgcgagcgacaggaggaccatcagcagatgggacgcaccggccggcgcgaattcgtcgtcatcgtccgagttgtcggttacgctttcgccgcgcagagtcttgccctcggcctcctgctcgcgctggagctcgaccgcgaggagtgcttggtactgggccgaggccatgcaggggtcaagcagcggacggtcagtcgcgcgtcttggcgacaaggcgagccgctgcgccaggactcaccctgttgcttcggcaggcccgcgacgaccgctcaagcaagatgacgggcggttcgtctgttccgtcgaggctgactgaagggcctgcgaaagccggcatcgtctcggtggttgtcctcgttgtcgttgtcgagtcctcgtcccgccgtctggactgcgcgtcgtcctggccggagcggctgagggacggccaccgccctcagccggcgcacgtgagagggcgagccagcccagagccgttttcgccggccaaaacgactcgtcctcgcccgcccgaccgccatcaacgcgccggacccgtcccaggctgagggcgcgtcctgcctgtcggggctacgagcgtccctctcttttgaccagctggtgagcccttttcgtcacctcttgcctcttgcgcctgtcctccggcgacctccttccctctcctctctccttggtcgggagcgagctccgctcccaaggacgacgagcagctccctctcgccttcacaacgggggccaggcccttcctcccaaaaggatgacaacgcatttttatttcaaactagagtcactgagcgcggccttcccctatgtgggtggccgtccgcggacgatactgcacacggctgaaccccctcccccacctccgcgacatcctcgaccgtctcgcttcctgcgcctgcttctgatcgctgaccttccttgctcctttgccttgttagacttcttctcttcgatctgaaccttctctcttggctcgacatcctcggccgacaactcgacctgctgaccgtgagtactccactctcctttcctccatccccctcccctccttccgaaaggatgagtatgtaattaccgtcagaccgtcgtgatcgacaactacatggctgcattgaccctcgcttgcgagggcatgttctgatctcccaacccccaacctcttcttttctacccgtccgctctgccgtgaacgttggactgacctttgcttcctcccctctgctgctcctgaaggtccctcgctgctgatcttctgctttctgtacgccgcctttctgcgccgctctcgaggttagtcgaattcttcttcctttttcctccccccttctcctcccccctctgacccatccatccacccacccctccccctcgcacgcacgcaggcgcccctccaaccatctttaccttccaggacccctactcggccctcgacaagatggtgcacgagttcgacaagcctcggccgcgcgtctggccgcggccgcgcaagccgcacttcctgcagccggtcgcgccggcccagacggtcgagctcgtcgaggcctggttcgtcgaggcgcagagcgctgtcgtcgagtacgacctgccgaccgagatcgttgtcgcgctcgaggtcacgatcgtcgaggccgccgagcccgaggccgctgccgtcgtcgtcgtcgtcgtcgtcgtcaacgaggaggccgcgttactcgacattccgccaccggccgacgatcctttcacctcggacagcctccacctcaactcttgccttatctggccctcgctctgcgcctcctttgacgcgaacgacgacgactcggacgacgacgacgactttgacatcctcgacaacacgccgacccgtcggtcgtcgcgcggtgccgccctcatccggccctccctcggtgccgctcttgagtcggacgacgacgcggcttggacgacgtgggagatggcgatggaggagaagcccgtccttgttccctgcaccccggccgacgtcctcgaggccaagcaagaggccggcctcgtcccaatccgtctgggctcggtcgggcgcaacccaatcaaacggacgcggccggcgatggtggcgctcgtcaacgctgcgctctggccggtcgacgagttcgacgaggacgacctcactttcgtcctcgagtcggttgacgtcgacgcggcggaagaggaggaggacgaggccaccttcgactgggccccgaaggacgaagccgctttcgactggtcgcccaaggagcaggacgaggcctcgttcgactggtcgcccaaggaggaggaggacgaagcggcctttgaccgggccacggccacggccgagctcgaaaaggagctgtcggccagtctcgccccggccaccctgatccggaagcctcgcacggcccgctttacccggaaccagccttcgatgctggccatgagctctctcatgctcgacaatgtcgacgaggccgacgagatggaggagacgtgtgtcgccgaggacggcgtctcgagcgacacggccgaggtcgacggctgcgacagcgtcgactgcatcccggtcgagcccattgccgcggtcgagtcggaggtcgagacggtcgccgtcctctcgtcggctgttgtcgagggcggcgaggtctcggcgtcgattgcgtcgtcgccggccgccagcgcctcgttcaagcgtaaggtcaaggtacgtccctccctcttgctctctgcccgcctgctgccgatgctgatcatcgcttgccttgctcgcacccaggtcttccttgaggggctcgctgtccgcaagccgcactcgccttcgtcgtcgcccacggcctgcgaggccatcgccttcaacgacaaggggaacgacgacgacgacgacgacgaagccgagtcgttcggcggccgctggtgcgccgctgccgccgttgatgccagctcgacctcgacacctcccggtcacaacctgtcgacgccctcgttccggtcgttcagcagcggctcggcgacgtcgaccgtcagcacaaacagcagcgacgaccgggcgctttgcacgcctccgccgacgatggcagccggcgtcgtgcacctttacttcgacgactcgtgagtccctctcgctccctctgagcgcgtcgcaagcagtcgactttgctcagcgagctgaccctcctcctccctcacagcgcctcgcggtcgagcctcgccctcccgacggccggcctcgtctcccgctcagacctgtcgctcgaacggccgacctccatcccgtctacgccccggcacaaaactcgcttaccctcgaccctcttctttggccggctcggctcgctccttcgcgtcgcttgaaggcactcgccgccacacaccgggtcggcactcgtcatccatcgccctccttacagctcgatctcccttctcagaccgagcatctcgaaccaggacgcgcatctcttgccgtcgcaccttccctcctctttcgcaggccctcgccacgagcgacggcacccccgcctctcctcttggtccccttgccccctcttgcgcctgctcccactcattccgtaactgccctactgtactccctaatcagcctctctcgctctactagctgtacacctaatgccttcttgcagttccgtctcagagctcagcgagcagggtcgagcgaggccggtcgctgcacctgtgcgctgctctgacctgctgcgcgccagcgacgatcgacccagcagtttagcaaggacttcgctcgcccaggacgatgctcccttcgtctggaggctgactgtttcgatggctgatgagctgagcgcggtcgccatgagctcgtcttgctacctcttgccgactcccctcagctgcagtcagcttccgttttctggcgtttcaagggtatcacggctggctttgatcccgtaatcctgtgccggcccacgacgctgaacgtagttctggtcggcccggactacggcatgcccgaaacagaccaaacccgagcttcttcgcttggcttttccttcgacctctctgtcgtcaaacggctcgagatcctcgtgcggagcctcccgatccgacttgcctatctcgggcccctctccctcaacgctctcacagatctccgcctcactggcatttacgacgacgactttttggccatccggactgtactcgagactgcaggtcgcaacctttttcggcttcatctcttcggctccctcaaaccgaatgaccccgactacctctgtcaatctcgcaccatcctcgaccttctagccctctgtccatctctccagcaccttggctgggacgacagcacgtgccgcgcagtctctttcacgcaaggctggcccggtctacgtctcgagaccctcatcagggcccaagctcagccttcgttcttcggagctcgccctggagtctcgacacgagcggcaccgctacgatgacgagctggacgaagagtggcctgaccaaggcattctcatggaccgttgggcctaccgagtcaccccactccaaccgcacaccgccatcctcttcggccgcgaactcaactcgtccttctgggccgccgacgcccttaagcgcgtccgtgacgtcgcgcgcgtccttagcgctaacgacatccggctcgaagatggccttggccaggtcatcgaacctctcgagtacgcatgtgcggcttctacgtctcatccagcgtgtatcttaccgacgcacaccgagctgaggccgactcatgctctttcgtagactgggaggacagctcgccctcctctgattccgatatggactccttcgattccgaagggtcattttcgggttcaggctggtcgtcggagtgaggcgagtgcccggcatcgctcgtcgtcagcgcacaggtgcgttgcacaacgtctcttcttctcattctctctcgctcactctttcggtgttgaacgagccagcattgcaccccttgccgtccgctcagcagcgtctgtgatgaccgcatcgaggcaaccatgcaccagctctccccccccccgcgccatttacattttcacgctcagttcctcgcagccgacctttccaccttgctcttacatggccatactgcccttctcgcccttgcgcatcaactttctttggcaaggccacctggatcctcggcgcacgctctcaaacagaacgaaacagacctctcttccgttgagcacgccgcttacggatcgctttagtggggtccttcgcccatctattccttcccgccaggttctatccgactgctcttttccgatgcttcccctgctgaacacgccgcttttgagctcggcggagcggatgaggacaacggcgcctgctgccggccggcgctccattttgagaactttgcgctcgagtaccagagcgacttgagggggccggtcgtgatgatgcccttgagcgactgggtcagtgccggccggcgggtaatcttggccgtctctgtcaggacggttgaagagagtgagcaggcgatcagcttttgcgggaagcacgtttcaggcggaaaagagacaggaggcgacgcacgaagcatgagctgagcccccaatgtgtccgccgcgccaatctccttccaaagcgccgcctcggcctccgaagccgtgtctgcccgcgcagtcttcgcgtactcggcccggatcgccgtcttgagcgtgatcggcagcttgcgtgcgaggagcgcccggtgctcaggcgagacgtcttgctgcaggtgaccagcagtccgcagggaggcagccggtcagctcacgcttcttctgcctctcacgagcgggagagacgcacgtgaagcttcccaccggggacgccgacgactgccaggctatcgagctccgacagcaaccggccgtagacgccctggaagcggttcatctgggcgtcgacaatgttgccgaccttgcgcgggttctcggcgccggggatgctcatcctcgggtcacctgagaagggcatcacatacattttgtcagccccaggctacagcgtgctatgaggaaggaacagcgagaacggacgaaccagagtacgacaggccggcgattcgctcgtagagatcgcgctccgagaacgtctctggcagcgtcagcagcgcgacgcgcaatgccgaggcgaggttgacctggtttgccagcttgacgcgcgggtcatccttgatgatccggatctgaggacgccagggagaggcagagggaggtgtcaacagccgcgacgggaggtttcgggcgaagccggagctcgggcggccggctgcgaggctgcctcggcgacccgggacggaagagagggacggacgggtttatgcatgcgacccgagcaatagagcgtctcccattcgatcaggtccttgcagagctggtcgaccgtgatcacgccgtacttgatcatctgtattccaggggaggagagagaccgcgcgcagcaggggaggaagagggaggaagagcgcaaaggttccggtcggtcagcccgtgctaccctcttggctctcaaagaaggcagacgcacagcaccctcgacctcgcagaaggcgttgaaccagacgcccgcgccgcccttgcgctgaacccagctgacggcctcggacccggcgagccgggcgtagcctgggtagtggctcgggttctgctgcaggttgatcgagtgaaagtggtcggcgtgcgtcgtcgcgaagatgaagtcgagcatcggtttcttcttgccgtcggccgagggcgagtcgcctaacgagggcgtctgggcgaagatgccggagccatacgcgaatgcgtagcggatcggcgcgcgaaacgagcggacgatggacgacagctgggcgagcttcgcctcggggacgggcacgagctgattcgcgccaaagtgggctggaagagagatgcgaggcgcgcctgggctcgaccggaggacggccgacgtcgttcgggagctcggcgagggagcgacagcctgaaggccggcgggctggggaggcgaaggagctggcgtcgtcgtcgtcgtcgttgtcgacggtagcgtcggctgagcgtaggctcgtcggagggcgagcgcccgagctggccttgaggaaggacctgccttggagagccggacgagcatggggcaggagagatgtgagatggaaagggcgagggcagggttgggagggcgaaggtgactgtcgagagatgggacccggtcgacttctggcgaggctgccggcgtctcggggctctcttgagccggccaattcagcggatcaaggacgaatcaagagcggccttagttaagctcgccgctttctcgtgacaaatcatcatagagagtcaatcaatcaaggtcgactcccaatgcgacggcttttccgcctcgcgcccgccgactgctggcctgccgccgaccctcgcgagctgccctgcccttcgctctcttccttcaagacaactcaaccagcctcgccagactccctcccaggaaccccttccttacactcgccagcttagcctgcagtgcctacgctcgagctcgcatcccgtcaagcttccagcagagtacaccgcaccccgcgcttagcagctcgcctcgaccgacctcggctcacccgacgcgaagcccgtcgcctgctcccttccctcttcctcctccgtttcccttccttcaagcgcacgatggtccgccggtttgcacacgacatcctcgcgacctcgcagcgcctgacgcaggccggtgtcggtccgacgcccgtctggcacgccgccatgctcacgcacccgccggcgccgatcaagcccatacacaagggctcggtcaagcagatccgctaccctgaagacgccgtccggctccgcttcttccaggacttcccgctcgaggcattcaggccgaagatcctcgccgagcgagaggtcatccggccgatccctgggcccgtgggcaaggactggtgggcgctcgagcggcggagtaagaacccgagctcggaagagtgcgtcctcagggtcctgctcgacatccttggtcgcgacgagagagctcacccacaacgtcttccgccgctgtggcagctgcatcgcgttcgcgatcaacctccaaaaggcgtatggcctgaccgcctccaaggcgtacgcgattgcctcggcccagtttgcccacttgcgcgcgatccaggaggtcgcgacccgggcagccttccgcgaggcccgggcctacggcgcccactcggaccaggttgcgtcgggcgagctggttcgtcctgccgacgcttttgcgcattaaacccgccagtccctccgctaataatgtcgcgcactcgtcggcttttttcgcacttgacaggcccggcacatcaagaagacggagaatgcgctcaagtcgtgggcgcccaaggtcaagggcaccgtcggcaccggcgcgggtaacacgcaaaagaaggctgggtcaaacaaggcgagcggcgccgtctggcagatggacgccctgccgtcgtaccgcgcgcaggagggccggttctcgggcggtcaggactggatccagggctgggacaagtggcaggactggacggccgagcgccggaagcgcaaggaggactacctccgacgcgagcggtcggcgagggagtagacgcgggacgtcgggcacggatcgcatggccgatatctacgcacgggcgcctgtggcaggcaactgaaccgggctggcttggcggcgatgaagatcagcaggcttggctgtcggtcgcaggtcgagggcaggatgtcttgctccggcagcggtcggcggcctgcacttgctgcgcctccgaagaaggctcgtcgggagggcaacgctggctaccgctaaagcaagactcgttgctcgtctgctgtgaggcccatgtagacaatctccggagatcactgggagttcggtagactgtaggatgagttgagagttgagggaccatgtagatggctggatgacgctacttcgcccaaggcgcagccaagactcgggatcccgaccgttcgcttcgcctccgtctgaccacatctctcttcattctcactcccacctctcacctcctgcaagcttccagcttcatcatggccacgataccagccgttcacgagctcagcaactgccagctcgtcatccggcccgacccttcgccggtcccccgcatgcctggcgcgactgtcaccggccacattgcgctcgtctcgcgcaacgaggacggcgtgcgcgacgtcaaggcccggctcaacgtcgcctcgctctctcttcagtacttctgggaggtccgggcgacgaacgagccggagccgacgtacatgcgtggcggttccacgttcgtctcgctcgttggaggcgagggcgagcaggtgctgctgatgccggcggctggcccagccggcgccgacacgatggaggctggctgggagttctcggtacattggactctcctcctctcttctgtatgggcgagattctgaccagcagcttgctctcgccagttcacgttgcccgagaagggctcggtcgacttccagacggccaacgttgcgccggcggcgaccggcacaggcaaggcccgagcgtcgcccctgccgacgctcgtcaacggcccgccaccgtccttcagctcaccgacacacaccatctcgcacctcctcgaggcacatctcgtcttcgtcggcgctggacccgaggcgagcgccgagaaggttgatggcgccggtcaccgcgtcgccggtagcgacctcgacgtcgtcgagcggagcctgatcgaggtccgggctgacgaccagcatgtcgagattgacgacgccctttttaaaggctgggagacgacgctgccagcgtctggtctcaaggtccaggtccgtactcgtgaggtcgctcgaagagggaagcgagatggctgacgcccgagctcgcctgcaggtcaagccggcgcatctgcccatctcggcctcgctcacgacgcctctcgttatcaacgctttcttccacctgccggcaccggcggctgcggtaccttctggcgagaagaagaagtcgtcgctactggcgacgctgacgggaaccaagggcaaggagaagaagcgcgaggaggaggcggccgcgcagcaccagcaccaccagcagcacgagggctcgtccttcaccgtcgagcggctcggcggccatctagacatcgtgacgaccggcgcggccgatgtccggattccactcgccgacgaggacgtcaacattgcctcgcagcaccccgtcctcgcccacggcctcagccacgagcttcagctcgacttcgcgcacccgctcgagcccgagctcgcccagtacggctcgatcgccgtacccggcctgctcgagcggaccttcttcctcacgctctgggtcaagacgtcgctcgtcgaccgaccgcagccaatcgtcgagcgcgttgcaatccccgtcgttggcgcaccgctcgcgaccgacggcagcatctcggccggcggcggcggtcagggaggcggcaactgggactatggcgcgccgccggacggtcctccgccaccgatggacgagccgccgacctggggcgtggccatgggcgaaggcgggtcggcaccggcatcgagggcagtcggtatcgaggacggtccgccgccgccgggctacatttgaggggggaaggtccggcgtgggctggcgctacgcagcccagcctgcgcgctgcgatgagatcctgctgcttcacgacgtcgacctcggctggagaggtctgctgctgcaggtttgacgggcggcctgctcctgggatatactgattcgtcaactggcctggtttgctgccagcatgcgactcaagtcgagctgccgagctcgtgcgacgcgccgcagacgtcgctgtcgacgatgctcgcgaccttcgtctgcaccatgcctgtcgttgacagacaagcactgcgccgcgagtgagatctacaagagctctgctgctgttaccaaatcaagtcagggtcgtcgtcaggcgagagggaagaccggtccaccgtcgtcgccttgaaaagagctcccgaccggcaggtctcgagcagctgaacaccgtcgcgcatttgcactcgacagccactcgacctccctccagtgtacctcacctcgtctttccaaggctgccatctcgtcggacgagaggaatcactggaagcgtggtctaccgctggtcgttacaccagtttgtgctctggacgaggtgcgttgtgtcccgccgagtcggtcatcccgcctcgacgcgtcgaagcctcggcaagcctcgtcgtcctgactcgtcgccttccctccctcgccttcgcagacaaagtcctgcctactctggagacacttatctagtcctgtgctcatcttcaccgttggatggaccgtagagcgtccaatgagccgcggtcgtcgcaacgactgtcgggcgctcgccctgactcgctggccgcgccgcccgagcgaccgcctccgtctcatggcgccagcccgctctcgacgcagccagtcaatgggtgagtgctggtctcgtcactgagctgccgacgagctcgctctctgacgtacattgttcttttaatcttgttgtagcaatagcaacggccagcacgcgccgacccgcaatggcggccccgaccgttaccggcgggacgaccctcctcgcaacggatcgtcctcaagccgggcctcgttcgacccgagcaagacgttcaacttcaatgagcgtaagaccgcgcccgcaaaggcggcgcctgcggcctcgtcgagctcgcagtacgagtctgaccgccgacagagctcgccgagtcgcccgtccgccgcgtcgagctcgcgtcgcgagcccaagcacacgatgtacctccctccgccgaccagctcgccgccggcagtctttaatccgactcggattggcgcggagctagatccttcgccggagagaacgtcgaggtactcgaaagcctacagtccggactaccactcgcggcggtcgccgtcgccgcctccaagacgacgcatggcttcgccttcgcctcctccaagacgacgcgtactttcgccatcgcctcctccgaggcggcgtgtatattcgccttcacctcctctccgtactcgtcctccgccgcctcctgcccgccggccgacgcctccgccacctctctcacctcctccgccgccgccaccgccgcaagagccgacaccgcctcgcgagccgacgccgccaccgccgccgtcagaggtccgcttccggcacaagcacgccgatatccctgacccgcggcgcgacaagtttggcaagccgttccggcccaagaacgcgcctgaggtcatcacctcgttcaaggtgcccgtttgggaagtgcgtctgcgcttcaaaaggttagtctccgacacgtctttgaggctaacctttcgcctgcgacccttccgctcgcagtgggacaaggactgtctctggtccgagccgccaccgccggcaaccgccgtgcttgtcaccggcctctcgcctttgacgacgcagcgcgagatccgtgaggcctttggccgcttcggccggatcgaagacttcgactgccgctacagcaagtcgaccggcaccttcctcggcatctgccgcgtcaagtatgcagagcccgaggcgcggaaaaagggcccccgtcctacggcgcacgacatcgccaagctcgtcgtcgtcaaggccaagggtgtcgcggtcggcacgcacgccgacgccgtcagcgagcgcggtcgtgtcaacattgtcctcgacggcgaaggcaagcttctcgagaaggccgagaaggatcttctagcgccgcctccaccgcctccaccgccgccgccgccgcctccgcttccaccgccagcactcatggccccgccgaccctactgcctcaggctcaacagccgccgtcggctcctgtcctcggccagccgccggtagcgcaggcagcaatgttgcatcctcatgctcagcattggcccaacgccgcctaccctcttgtccaccctccatttccgccgtcgcaccagtcgcaccacccgcccattccgtccgtccagcagcatgcacctatccctcattcgggccctgcgctacctccgcccgcattgccgaatgtccgccgcggccacgacgggccgacgcccggacagattgccttgtcgcagaatccacacttccagccgcctgccgaccgctacggtgccggcggtggctcggcctcgtaccgggcgccaaatgctcagggcggccggtggggaggtcctgcgactggctcgcacgctggcccgtacaaggtccgcgacccttcacgtacggccttcaacgcgccgtcttacggcaacggcgatcacggctacagccatcgttacggctacgccccccctccgcccagcccgcgccagacagcacccgccgcctccatctcgcaggcgtcattcgcagaggaccccttcgccaacgcgccctcgctgtcgaacggcgctgactctggctggggctcggtccatcgggcgaacggccgcgactcgtcgcctcatcggcgcgagtcagagacgatccacgtcgacgactcggactcggacgacgaccggagcagggcggccggtccttcgtcccctcatcggcgacactcggtgaccgtcgatggctcggcactggcatcaaggccgcttaccttcaagaagctcccgggcctgaagccacggccgagcccgaagtctgggccagcgccgacgaccggcccggtcgtgcacgagtcgccgctcaagcggcagattaaaaagtcgaagaaacagccgcgacgcatggcgttctcgagcgacgacgacgacgagcggccgccgcctcggccaaccaaaaagaaggcgccggccaagaagaaggccgacattctccgccggccctcgccttctgcctccgaaagcgaccgccagcggcccgactttgagtcggaggaggacgagtcggagcagagtgaggaggtgcccgccgtcgccggacggccgatcaaaaagccgcgcctcagccgcgactacaccgacagcagcgagggcgagcgcgagcacgacctgccgacgcggccgccagccaacgcgccccgtgtgtcgccaaagaagagaccggtccctcgaagcgatctcgagagcgaaggcgaggacaatgaggcgctcgagccgccggcgccacccgtcgcgctacgccctgcgcctcctacacctgtcgccaagccgactccggcagtatcagcaaacgagcggccgaccggttcgccgccacctacctcggcattacagcctgaggctcccgtcaaggtcgagacggcgccaccggcgatgaaggccaagaagggcaagccgtccaagaaagacaaggctgccaggcgagtcgaggagcaggcggccaaagccctcgagcaggctgaaaagctggcggccagggcccgcgaacgggcggcagagctcgctgccagtgggcgcttgctcatcgacgactacgagcccgatgccgaggatctctggctgctccgccgcatctcgcggaaggcgctcaaggaggaacggcgccagctcgttgaggccggcgccactccaccggtcgacgacgatggctcggacggcgcggcgagcgacaccagcgccgactcggctctcgccgacgagtataaggtcggcggcggcgctctcatcctcggcgaggatggcgagccgatcgagccggccggcgagccgagcgacgacgaggatcggcactgcttccggacaaagggctaccgcaaaattcccgagcgcgagaaggcggcctacctccagcggaatcaagccgtcgtcgacgccgacgacgcgaccaaggcggccgccatctcgaacggccgatcgaaccggatcgagacccgccggctcgtccagggcatggaccagcagcgcaagggcgtggccgaggcgggcgatgtcctctcgttcaaccagctccggacgcggaagaagcagctccgctttggcaagtcgcgcatccacgactggggcctctttgcgatggaggcgatcccggtcaacgacatggtcatcgaatacgtcggcgaggtcatccgggcggccgtcgctgacaagcgcgagaagcactacgagcggatcggcatcggcagctcgtacctcttccggatcgacgacgaaagcgtcgtcgacgccacgctcaagggcaacctcgggtgcgtcgcctcttcgccctctccgcgacttcggtcagccggctgaccctgcttctcatgcccgcctctcagtcgcctcatcaaccactcgtgcacgcccaactgcatcgccaagatcatcaccatcaacggcgaggtccgtgccaagttgcctgccgaccagagtatctgcggatccgctgacccctggcgcatctctcttccctacagaaaaagatcgtcatctacgccaaatcgaacatcgaggtcggcgacgagatcctctacaactataatttcccggaggaggatgacaaggtgcgccgccagagccccggtcgacactgctgctgccttgctcgagctgaccctctgctctgcccattctagattgtctgcctctgcggctcggttcgatgccgcggctacctcaactgagagcctcctctgccatcctcccctctgtcctcttacacacgcctcccaattcatcccttcgcacgccccgtactcctcttccatcttgctctttgacgaccattgcgcgtcccatcgcttctccctcacaacacctgtcctgtcgccatcgcatactgtagcacgagatcaccaatgcgtctcttcctggaggcagccctgctgagggagcaagtggagcagcgtctgccgagtacgcacgggcttgccgcgcagcacgcaggcgccggttcaccggcctcctcctcggctcgacctttcgaccaccctctcctcctcctcccgcaacgccttggtctcgccaccccgacagtcatggaccagacgatcctcagccttttctttccgtcctcgccccagctcccggctgaagtcggggtcaacatcctcggccggctcaactactgggacctccggcgtgttcggcgcgtcagccgcggcctcgaccagctgcttctcctccacccgacgcttgtcactcgcctcttccgaggtcgagtcgacgctcgtgccgtcgccgctgccaaggccaagtcggtcggacgcaagcggacgacggccttcaagatccacccggtcctcgacggcagcgtccgctggacgacgccgtcccgcatcgacggagtcgaggtcggcttcgatgagtgggacagccctcacgatttgctctcgtttgacgcccgcaactagatggcgacgtcgcctgcggtcaacgagctcagctcaagctccgtgccgacgacgttccggaccgcgtgctcgaccagccggccggcgtcacggtgctcgacgtcatggatgcgatgtgcaagatgctgtcgaccgtcattcccggcgtctactgcaacgcatgcgacacgtggatgcccgaccgtgacttcaaagaacacaagcgggacgacaggtaccgggtgctcgaagcagatctcgagtgggacggaaaagacgacgacgaggacagcgaggacgaggctcagggcggcatctttgctgcgctcggcgacggtgactacgaggccgcgaaccgaccgtttgacatcgccgacaacctcggcaggaccacggacctctactgctccttctcgtacaaggtgacaaaaaaaaggcgagctcgagctccacatcattgccgagtgcccggtgcgcactttacatcttcgacccgcagtcgctgtctcggctgaccactagacgtttccaattcacgcagtactgagcgcttaccaggctttcacagtcaaggatctagtcgtatgaccatgattacgtcagtccctcccggcgcaggttagcagctaaggaagggtcagaggaagccccgtcgaggagagcatactagtcgccttgccaacagaaaggcatcaccgaaatatttgcgccgtctccgttgatatctctgctgagagcgttcgagacgggttgacgccatggaagggagtgagagcaggaagcggacgcgcagcaggccgcctgcagcccgccaccgctgcctacctgtcctcgacctcaaccgccactctcgatcccccagatagcctcatcgaccctcatgcccctgccagagatcccagtcgaaatatagtccgagatcttgagcgaccccgtcctcggctactccgacctgcgagcggtcaacgacgcctgccgcaccctccgcgacgtcctctcgctcccggcggtggccagccggctcttccgagggatcttcaaccaagcccgggtcgacgcgagcatcgcccgaggggaagcgatcttcgagccgcatcctctgcttggaatgttgagctagcgaccaacgagcaccggcgtcgagacggctacgctcggcactcacagcccacggcctctgctcgagcagccggcccgccacgagatggcgacgaaccctccggtcaactctgtcgtttctacatcgaagatcacgacttcatcatgggccgaagacgagagtggcgtaaccgttctatgtctcgtcaagaagctgctcgagctcttccgcgacgagcgtcggaccctcgacccttgccccgactgccgtctctggatcactgacaagtgcctgagctggtccgaccgtgccgacttcgagtcgaacccaagctcgtactacgtcctccgttacggcacctcatacaggaacgtcttcagtttcgtcgataagaacaatggccaagcttacgtcgaccgagacggcgacgtcacgcttcacttcgcagtcactgtctcgcggtgcgtcttcccttacattctgtctctcgtgaggtcacacacaagctgacggtacagatttcgacgggcaggataactcggacgaagaggtctcagaagaacaggacggctctgacgagtgactctgccagacgcacacgttgcacggcacttgttgagccttccggagcggctcaagcctgcttcgcatcggctaggatatccagaggacggcgcttggagttccacgagagaataagatgggaagcgaacactgcatgactgagagaaagcagtgcaaggttgtctggaggcatggaatcacgctttgtcaaacacgtccatcctgaagaggcaaggagcgaagcgcaagcgtcagccgagcgaaaggaggcgagcgcgtttagtctaccagtcaaacgtactgtgtcgagccgacggggcctcctggcaggtcacgtagaatgaagacgttcatgtctgtggggacgggcgggtggccctgactataagcgagagaaaggaaagaccctgagtaagcgagcaaaggccacgcaccggtccgcatctcggcaagcgtcagcttgaggagcttgtcgtcgagctccttgccctccttcttatcgacctcgccgaggagctccccgccactctcacggacgtcgacccggttgcggcgctcgacgagcccgcgcttcttctcgagctccgccgccttgcgctggatcaggttggccatcgtcttgtaaaggtgcgagatcatggcggcgtaggcccgggcgaggtcgacgtgccagaggtagaaggtccgagacggcgcccggtcggcagagcgcgggacctcttgaagctcgaggagagatgaggcagagagagcggcagtaatgacgcgaacgtccttcggcgcgagcatcgccactttggaaatctgcagcagcgattgagggacgagagtcagccttcaggtcggcgagcgagctccaccccttcgccgggacgcacgtgcttctcgtccatcttgccattcttgagaacgacggccatgacgcgtcctgcgtcgtcgccccagcgctcgcggacgacgctgtcgagcacgcgacccttgagcctccggcagacgccctcgaactcgactgcgtagcttgccgagctgtcgcgggctcccttgaccttggcgaggatctgagtctttgcgcccgaggccgtcgggttgtcttctgccgcaagcagcgcacagaagcacgcgacgagctcggccggcgttgacgaggccgacaggacgtcagaggggtcaaagatgcccctgtggagcttgaggttgggcgagaggtggtgaacgatctggtggacggtcaccggcggcgactgggtctgggcgagcgacgaggcggcgtcggcattgaccgagaggagcgagaggacaacctgtgcggcctcaggattgagccggtccgaggcggccttgacgacgagctcgtcgcgcatcaggagcgcgaacttgtcaaagttgacgtagaagtaggcggccgggtcaatctcgtcgggctcgtctgctgttgccgtcttctttgccttgccgtgcctgtcgagcgagacgggaggaaagcggtcagcgatttgaagacgtgaggagcatcagcagcggccgggttcacttcttcggcagcagcccccgccgccagtcccaccactcgtcgcgcagctcgctgatccggacgttggccttcgcaaaggcctcgttccggtccttgggcgcgatgacgccccggagcttggcgagctcctcctgcctgagcgaggaccggagatagtttggcgaggtgaggagcgacgggtgggcggggaggatgtaggacgtctggaggagggcgagcagtgtgcgctcgatcgaggcggcacctgtcaagatcggcgttgggtcagctccgggcgtagaagtagcctctgagcgagtagcctctgagcgagtagcctctgagcgagtagcctctgagcgaggaaggtgaacgcacgcttcttgtccatgccctggccaccgacgagcacggtccgcgtcaccattcgcttgaccgtcttgtgccgcttgcctttctccttgcccttgcccttcgagccctttgagctgctctttgacttggacttgctcgacttgcgcgccggcttcttgctctccttcttcgttttctttgacttggttgaagacttgctactggaagtcgtccgcttacgcttccgagtcgagcccgacgcgtctgacgcgtactcgtcgtcgtcgtcgacctctacatccgacgcctcctcgtcggacatcactttcgtcgcccgcttagcccggctcgccccggccgcacgcttgagcgccggcggcggcttgcgaccctttgacgatgaggccgacgactttgagcgctttgagcgcgagcgccggtcagagccgctgctgctggcggtcccgctcgcgtccgagacggcctcgctctcggagcccgagtcggagccgctcgccgacgaagagccgtcgtcgtcgtccgagtcctcgccctccgaggccgacacctcctcttcgacttcctcggtgatctcgcgcgtctcgaccttgccagcgccggcgccgcccaagccggcgagcacgtcggcgaggcaggccttgcccttgcccgccagcagctcaaccacctcggccgcgtcgtcgccccatttcgtccgtgcgccctcgacggcccggccgacacgctcgaggtcaaagacggcgcgcgtgttgatctcgaacgagtcttcgccggtcggcatcgaggccggcgtgagccagaggaggttgtgctgggccaggaggagcagggccgcccggaggagctggcccgacgacggcgggaggagcgagagtttgtggatctgcgggatcgtcagcagaccgcgatggagaagcggccgagcgaccttctgcagaggtggccgagcaagaggggtcgtcagttggctgctgctgctgctgctgctcgacctgagggaggcgcgcaggcgacccgagcggcgagctctcagacgggacgcacgccgacgagtgggccaaagttgtgctggatgatatggaacgcgagccggacggcgtccttgtcggtcgacatggcctgcgtcgagcgtcctgagggaggttcagaggagcaggtctgccgtcgtcgtcgtcgtcgttgctgggctgccgacgttgcttctctctcgcgcgcccaagtcgctcccgtgacatctcctgctgtccaccaccgtcgacccacctcgtccagcaactctgaccctaccgccacctcctcgaccgcatcctatacgttcctgatggccgcaacagaccccgtggcacctccgtgcgttcacatgcgggttgagcactaggcgcgctcaaagggccaaacgagcctcgtgctgacaccacctctcgcattgcagggcgacggccgacctcgcgacgagctgggctttcctccaggatggcgtcgaccacattatgctccagtgcatcccctctgttctctgcgcagcgtctcgcagctcccactcgctgctggctcgagcgcaggaggtgggaggccagccaaggagagctcggcgcgatgcgcgcgcgcgcgaccggagcgagcggggtccgagcagacacgcatggcccctctctgagctcggacgtcaggcagatgcctgctagggctcgagggcgctactggaggacgctcaggttcgaaggggagggtcaggctggcggctcactggcgggcgggagctcggacgtgttcccttcatcgtccttgtccggacttcgctgacgctcaaccctcctctgtccactctctcactcgtcgttccccctcccgcactttacaccctcaccgtttctctcccatagcctccaaaacggcctctcgtactcgtactacatgtcgctctacaccgtctcgtacaactactgcacgcagacgcggccggccgcgccgtcatcgggcggactaggcatcggcgccgcgcgcagtgcgtccctcctcctctccaacctgctcttgcagctcgcgagacctttgctcctttgcgctctcgcggtcgtgccagctgacgcttgggcgtttgtcctgtctgcccgtttcaggcggagcgcatctgatgggtgccgacctctatcagaacctgaccaagtactactcggcccacctcgacacgctcaacaaggtgcgcccggcccctgacatcgctttgacgcccaactctgactgatgcgctcactcctgctcctctgcttcctctgccttcgcttccttgctctgcccgactcaggcgtccgacccgctctcggacctccccctgctccagtactacgcgactgagtggacgcgctacacgaccggcgccaactacgtcaaccggctcttctcgtacctcaaccggcactgggtcaagcgcgagaaggacgagggccgcaagggcgtctaccagatctacatcgtgcgtcccctcttgcgcgcgtcagtcgagtcctcggccgacagacagcactcgcgcaacctccgctggcgcgctgacatctgcctcgctctccgcctctttgtttgaactcccagctcggccttgtccagtggcgcgactgcttcttcctccaagttcagaagaagaatcgcaagctcgcgggcgccgttctcgcgctgattgagaagcagcgcaatggcgacgagatcgacacggggctcgtcaagaaggtcgtcgactcgtttggtgcgtctgcccgcttgctcgctggcaggggccgctgcgtgtacgacaggctctgacttgcgtctccctcggccttgctcggccagtctcgctcggcctcgacgcgaacgacacgaaccggcagaacctcgacctctacaaggcccactttgaggtgcctttcctcgaggcgacgcgcgccttctacaaggccgagagcgatgcgtttgtcgcagcccactcggtcagcgactacctgcgcaaggccgaggaccggctgcgggaggaggaggagcgggtcgaaaagtacctccactcggagacgcgcaaggcggtgcgtcccctggtccccaacttgctgactgcgcggttgaagagacagcgtggctgactgaagcgcgaaattttacagctcgtcagcacgtgcgaggacgtcctcatccgggcgcatgccgacctcctctgggacgagttccagaacctgctcgactacaacaagtcggacggtgcgtccgttgtattttcgtcccgcgtttcgacaggccaggctgacgctgaccttgctcggtgttcacagaccttgcgcgcatgtacggcctgctcgcgcgcatccccgaggggctcgagccgctccgcaagcggttcgaggaccatgtccggcgcgctggacttgcggcgatcgagaagctgacggcgaagcccgacgcggcggcggccggcggtgctgctgctgccggcgaggacgaggcggatgagggtgaggagggcggcggaggtggtggggctggaaagaagggcgaagcggccttccagccgaaggcgtacattgaggccctgctcgaggtccacaaaaaaaacctcgaggttgttaatgcgagcttccggggcgaggccggctttgtcgcctcgctcgacaaggcctgcaaggactacgtcaacgccaacgcggcgaccaagtcggccgacggcagtcagtcgtctagcaagagcccagagttcctcgcccggcacacggacgcgctcctcaagaagacaaaccgcgcgggcgaggcggccgacctcgaggagggcctgaaccaggtcgtgcgtcccgatctgcgcttgcttagtcgtccttgcttgatctcgcttgctgacgtgcgccccccgtgttcgctcgatccttcgcagatggccatcttcaagtacctcgaggacaaggacgtcttccagaagttctactcgaagatgctctcgcgccggctcatcagcgcccagtcgctctcagacgaggccgaggccagcatgatcaccaagctcaaggaagcggccggcttcgagtacacgagcaagctccagcgcatgtttaccggtgcgtccccggtcggatgccagcgtgtcgcccgcccgctcgaagctaagagctgacgcttgtctccacccctttcctcccccggcagacatgaacctgagcaaggacctcagcgaccagttcaacgagaaaatgcagcagactcatgacccgaaggagctcgacggttggtcctctcactcttgcgaggacccctctctcacaggacgcttgctgacgcatgcatgaccttctcccgcttcagttgacatcagcgtcgccgtcctcggccagggcttctggccggtccagccgaacccgaccgagtttacgatcccggccgacctcgccaagcactacgaccgctttgtccgctactacaactcgaagcactcgtgcgtcgccgtccctgtcccaagcgcgctgtctccgggctgacctcccttcttctctcctctaccttggcagcggccgcaagctgacgtggctctggaacatctcgaaagccgaggtccggacgcgctacctcggccagtcgtacatcctgatggtctcgctctaccagctcgcgatcctctgccagtacaacgccgccgacgccttttcgtacaaggagctccagacggcgacgagtctcaacgacagcgtcctcaagggctcgctcgcgccgctcgtcaaggtcaagctgctcaacgtcgttaaggaggatggcgaggagagctacgagctcaactacagtgcgcttcttccctgctacgtatcgtcgctgcgtcgcacctcgactgactctcgcctcttcacccccggcgcgccccttagacttcaagaataagaaggtccgcgtccagctcaacattccgatcaagtcggagagcaaggccgagaatgcccagctactcaaggacgtcgacgaggaccgcaagttcctgatccaggcgacgatcgtccgcgtcatgaagtcgcgcaagactatgaagcacaacgtgcgtcgcctctcgtgtccgcccctgcacggcagctgactgggtctttctttgcgcctgcctttcagaatctgctgagcgaggtgacgcagattgtctcggcccgcttccagccgaacgtaacgctcatcaagaagcagatcgaggtcctcgttgagaaggagtaccttgagcgccaggagggccagcgcgacacgtacaactacgtctgtcccatttcgtttgttgcccgtctgctcgaacaggaactgacgagctccgcccgacccctaacagctcgcctgaaaagcgtctcgcaagccctctctcggccggccacgtccaagcctccggctcgccggccatcgcaactctcaccgtcacgccctcacccctgtatctctacccgcacacgccccgctcctcgcaaaccatctcttcctcctgcacaagtcccgacgcccttgtcccaccagcctccttcaacgactcctcctatcttggccgcttagatgccccttccacccctctctcgtttgctgtcagcctttgtctaaggcatgccggcctacatgctctctcatgacccccctctcagacctccgtctctcgaaagcgcagagggaggcacagtgtcgaccggcgagctgccccttttttcagctgaaagtctcgttctgaggccactaacgcaggtcactcttcgtggaaggagctcagctaagcgccgcttttccctgtccagacgctctgcttcgcgccatcgagttcagcctgagccggacggcaacgcgactcgaagcctcggctttgttcagggccggctgtccgcgtaatgcctgcgagaattgcagatgcacttttcttgggccgtcctgcgccgcgaagacttgcgctttcgacctctcggctcgtgtccctgcccgaaccgtcgacacttctcaaggcatatctccaagtaggttgccgtcttggcttactgactgcacgaggacttgctctgacacgcttgccttcttctctccttaggatgaagcagaacgcaggtgcgacccgtcgtccccttctagccaccggcggcgcagcctcggcggttgagcatgcacgagcaggcagcagcagcagcaagcatccagcttgcaggggcagcggcagcaggaggcccgggcgcctttcggctggcatcctggccagctcttggactgggagcagactgagaggatcggcagcttgggtcgtttgagcggtggccggcgcgcaggctttgctgcctgtgcccaggtcgatgcaggcgaggatagcgggcttcgtcaacggctttgacctcttgggtttggtcctagaccttgcctgtgaggtcgcggcctgcttgctcgctcgagtccttcgggtccgttccccggccgaccctgcgctgctcagcaacggcaggagagcccgggcttcgtcccgccagccccctcgcccgccagtctgcctgacctctcgctgctgctcctgccgctgcctgctcgctcaaagcttgccgcttggctcgctcgccttgcacctcatccggccggatccgacactgataggtgatccacccttctctctttcagacgtccactcctcccgccgcaagtcgcgcaaggcgcacttcgacgccccgtcgtcggtccggcgcaagatcatgtcgaccacccttgccaaggagctccgtgagaagtactccgctcgctcgctccccatccgcaagaacgacgaggttaaggtcacccggggcaagtacaagggtcgcgagggcaaggtcgtccaggtctaccgcgccaagtacgttatccacatcgagcggctcacgatcgagaagtcgtcgggcgccaccgtccccgtcggcatccacccctcgaactgcgtcatcacctcgattcacctcgacaacgaccggtacgtctccgccctggctgctttcccccattgctgctcgaggcagcgcgctgacctttgctccactctcttctctctgcagcaaggcccttctcgcccgcaaggagcgcaaggtcgccgagcccaaggaggaggccaaggcggagtaaaaacgataaccttgccgttttcgactatgacccccctgaaacaaaagccgcgcccccatcagacgagtggcctacgggcgctccgacgacacgcgagcagcgagtgcctccgggcgctcgcgccgagtatctgtgcagtcagccgaaggagggagggagaagcccggatcgggtttaggagggttgtcgtactgtgctcgcctcgacgctgaccggtcactgatctgatttgagcaacacgagggcgggttagaggtcacgctgtgatggtccgagccagcgcgcgctcggacatgctgacctcctgctgacccaacccatgaacaaggacgtaacgccagggcttgcaggaggaccagctggaaggaggtgtcgcttgcctcttgttgacggtcagggagggccaaacggggcccgctagcttgacaggcgaggccagagacgagttggctggctgccgagagcgtagtcgcacgagaggcgacaaccctcgctctcggcccacaacgacaagaccagagacggtcggccagctcggactttgatgactcttcgacaacagcgtctgtccaagggatgctggaggggagggtgtgctctgcggccgcgcgttgactgcgccgcccggtcacacggacgcatacaagcatctcatcgctcgccctcactcagacaactcttcgatcgaggacatggcaggcaggagtgctgacgagcttggtacgatggcaggagcgcgtcagcaaagctcaggcagcgtcaatggtgaggtacgaggagcggaggggcgcagatgttgaggtcagacaccaatgtatcgcttggagggacggcggtcgcgctgcctcacatatctgacagcggaggtcgaaacgttgcgagtgagatgtgagcttcagaacagaataatctgtcgagaggcaagtcttgagtcgggacgcaccggacaagtaggtgtccagtgtcagactgctcataccagaggagggacgagttgcttgagggtaaagaataagcctctcgccggccccaaagcaggaaacgtcgaagcgcatgtcgggaccgacgacgtcgatatgaacgagcccgcaactatggcaagcgccggccagaagccgggtcgacaggagggcacgggccgcatcgagaacgtccttgaccgtcactccggtcaagctatgagctcggattgcggcgagtccccattccgacacaatggcgtcgatgccaatcatgaggtcgtccattggaggtggcgtcgcctgctcggctagggccggcagctgaaggaaggggacgcctgaccggatcgacttgtggctagcgaagctccatcaattttcgccggcccaggacgcgaccactttgagcagcgggtgcatcttcagattcgtcgagcggcttgagtccggggtcgcgtcggcctcgttgagctcctttcggaagaggagcgtgtcgaggggcggatgggcgagcagctcgcgatggttgcgcgaaagacggccaaccttggcgacgagctgctcgtacgagaggtagctcaggatctcgcctcaaagctcggtcgggagcgttggaaacagccgatgtgtggcggcagtacggcgggtggcggagcgggtcttcatggcgaatgagcgtagaaaggatgagagttgggtgagagctgaggtgatgtgatggatggcgggagctcgtggtcgggccttcgctcggtcgctcgcgtaaagaaaggggcgacctgtcgacgcgtccgtgcgcaagtgacgaggctctaatccctgcacgcctctcgctctctcaacagacccttctcattgcccggagactcgccttttgcgcacaataagacacctttagaatacgcgaaatcaggcgagtacaccgggtcgttgagggctttggccaggctcgtcggccgcgggcgtcatcccacgatgtctcgaacgacgtttagggaggcaagcatggagtctctcgaggagagcaccctccgaaaggcaggctgcgatatgaggccacgttgaacaggccgcgcgagatgacgggcgtccggaacgaggtcgctgaacagccggctaacagaccggacgcgccgacgctcgagaccggatcagttgtcagaaatctcgtaaatgactccagctggcagtcggcttcggtgaggagcacaaataggtggacgctttgaagctggcgaggttgaaggtcaagcttctcggcggtcgtcgggtcagctctcgtgtgcaggggtcaactctcgtctgttcggctggcccggcacgcaccaagctggacgcgccgccaggccggaagcctctgcacctccgatcagcaatgaagcggtcagcgtgcatgctctgtagagcccgtcagccgtatccgaggtcacgtcgccgttgagcaaacaggatcaggtgtcggcgggcttccgagggctattgttgtcggctccggcgagcttcggccggccggcaagagcatgcatggcgcgagcaagaccgcctcctccactcgaacagcgaccagcagccccccctccccgtctcccttctctctcgcccgaatcaaagactcacaccaggaacgcagagctagcctctcttcgtcgacagcaacaacctcctcatccgcgctcggcctcgctcagcctctcgctccctcgcgcctctcggccttgcccggcgcttccgcgacacacctctctcgacgcgcccgacgcgctcgcctctcctcgctctctgccgcccatggtccaggcctcgtactcgcctctgtcggcacagacccggtcgacgctgctgtcgaagcttgggtcgaattccgtctggtactcgtttcagcggcggtccttcaaccagcggatcgtgcgtctcgctcctctctgctcctgtcgcctgcttgctcggctcgactcggcaccggtcgatctggcacgctgaccctcgtgcgaccctatccggcgacggatttttgctctccaggccatcctcaccggcgcaatcctcgtgattgtgctggccctgctaccggtcgtttccgagccggtgcacgagtcgctctcgggcgcgtcgacctcggtctctggcctcgtcggctggggcgccgacgacagctacatcggccggaatgcgagccatggcgctctcagccatcacggccgcaaagacaactttcgcgagaacctcaagcccgacgtcaagtatatcatgtcgggcttccactctggctggagtgcgtctcccggcagctggcctcgcctgcggaccccgccgcgccctccggttccgctgaccatccgccgcctctgacgctgctttaacacttgcagcgaacgacgtgatcatgggcgtcaaccgtgagtatcaggtgggcgctgccgcttttagtcgaccggcggctgacgcttgctcgtgcctcacccgcagtcatccacctcggcctgatgaccggccgggtgccgatcgtctttcccttcccgccgtcgcggcatctacgctacatcgacgacgaggagcacatcccgccctcgatgccgttcacgcgggtctttgatctgccccggctcgcgcacacgctccgcatcccaatcgtccagatcgacgagctcaagacgcggatcaagacgaagccgctctacggcgaggcgatcgatcccatcaagccgaaggaggaggagctcggcggctggagcacgtggatgatcaccaaccccgaattcttccccaagaagggccagacgctgaaggacgtccccaagtcggatggccggcggtgctaccagctcgacgagtatcgcatcagtgcgtcgtcctccatatcttgcgcactcgatgacccgcccccgctgacctctccttcagagccgacctttgtacccgtgcccttgacgttcaagcctaaggttgactggcgctcgacctcgctcgacgagctggcgaccatcttccagccgcagcccaacccgttctcgacctactacctgcgcgagggcgtgccggcctacttcaaggagcgtgatcggccagtccctgcccctctgcccgaggagcatgtcctatacgtcgactttctctacaacctcggcgagggcggcaccgacggccgcgaggactggaccggcatcagcggcctcggcaagcatggcgcttgggagacggtcggccagcacatgcactgggagccggcgctcgaagagatggcccggggctacatccgccggatgtttggcgtcaaggacaaggcgggcaagcggccgccgccattcattgcggtccacatccggcggtccgacattggcaacgtctgcaaggacctgacgccagaggagctcgaagcggccgaggaaaaggactgctactcgtcgctgacaaagtatgtccgcaaagtcgacgccgtcaaggctcggcttgcctcggagcgcggcatcagcccaaagtacgttgtcgcgacgaccgacgagcacgacgagggattcctcgaccaggtccgcgagctcggctggcacctcatcgatcacgacggcgagcagacgatcgagaaccatggactctggtgcgtctggcagcgttcgactctgcgactgccatctcgcgctgaccaatcgttgctgttgcttgacaggtacccaacactgctcgactcggtcattctcagtctcggctcgggcttcgtcggcacctcgggcagcacaagtcggtccgccttgccttaccgcttcccttgtcggcgagctgaccgaaccccctctctggtcactgtcagtgagcattctcgctcggcgtcgcgtcgaggtttggaaccatggcatcggcgcgcaggtgccgcggcaatatggcgtacgtcctgtgccatgcgcttcgattcctggtctcgaggagctgaccctgacagttcgtgctcttctgatctcgcagggcttgtcagaggacaacgagcccaagccgtaatggctggtcgtgcagcctgcggccgaggaggccgcgaccgtcgacgtcgcctcggccaagactctggccgaggttaaggtggccgacacaattgggttcggagctaagggctaccggtcttccctctttccatcttcttccggatcttctaattctttgcactggcgacccatggtctattcatcgagagagagactttgtgggcaaagtgtcgagcatgttcataagagggcgtggtagatggcgtgatagaggacagggcggatcggcgataactacatagcgatgtgggacagggagggcaaggggtctaggccgctactcggagtgagcgcgagcgagccgagcttgacaggtacgacagctcgctgaggtcaggcaaaagcgacgggggcaggccgccaaagctatacagaggcggcggtgtcttggggagagcgtcgctcgtccgacgcttgtacggcagcggattgaggtagtcgacgtcgtccgagttgcggcggatcaggacggcctcgtcgcaggcgaacataggaggtgagctcggaccgacgttttcgttgtcgtcgtcatccgagaaaccgtcccagtcggtcgacgagtttgatgaagtcgaaggagaccgccggaggacggagaccgagggcgcatcgtcatcaacgaaagtcggcgacggcggaattgtcgactgccggcggccgccgaggatgctgccttcaagcgactcgactgagagagtgcggatcgagatgagcgactcgcccggccggtcggggaagagcgggacggtcgtcgtcgccagctgaagcggtgagggcggaattgctatcggcgcgaaagtcgcgtgaggcgagcggaccgtctcgggaaggatagtcttgatctggcgggcgggcaggttggtgggctgagggagggaggtgggcgctaggtcagtgcctggtcgaagatgtctcagagaatggggcacgcacgagtgcaaaggggacaggccggcagtaggacgaacgaccgcggtaaatgttgtcctcgtcgtcctcatcgtcttcgtcaaagctgtcgtcgctatcgctgtcggtcgcccagttgaaggcagggaccggagcaacgccgcggggagacgcgtgccggcggccggatgccgaggtggatggtctggcctcggggaaggtcgtgtatgactggcggctgaggaggctcgagtagagcatggtcgagacggtcgagacgggctggttgatggtagcctggtcaaaggatgggtcagcgctcctcctctttttgagctgcgacggcgaggtgacgacagaaggtcgggtgaggtctcaccatgactgtggacggagaccggtcacgaaaagacgtgctggcagcgggaggactgcggggatcgactgggctgcggcggcggcggcggtgaggatgggagaaaggatccgagcagagcgggcgggctcggttttgaaggcaggtcggtgtcggtcggtcagaaggagtcagcgagaacattgcgcgagtcttgctcgactttgggtcagctagcgagcgacagggcgtgtgtgtcggtgggctgggcggcttgcgcaggatggcgaacgtgactggcgtgctgctggcgaaaaagacggccgcgcagcagcccgcctgccctcgctccccacgttgcccgccgctgggcaaagcctgttttacgcgtcagcaagtcgacattctgcaagggcgagccgacgacgccataaaccgcttgtactcgtaaaggatggagagtcgatcagctcgagcaagtactcgcgccgctgacgatgacgcctccgacctgactcgacgagacgtgctgcaggcttgcgtgcgagtcagcggacccgcttcccttccaggaccttcgcgcaatcgtcggaaggacgagcttcgaccgacatcaaggtcgacaagccgcgttcctcgccggctctcgccaccccatcgcttcagataatgtcgcattggatgaggtcgatgtacaactctgctcgtaaaggcgagcgtgatgggaggaggggcgggggggacacaatagaagggtcgagggggaaggggcgggacgcacggctcgagcctgaacgagagcttgccgtcgtcccctcgctcctggacgaagcggagcttgtgagtgatcatgaggctgacgaggcgcgagaggatgaggcgctcgtcgggcttgacgatctgggcgttgatctgacgacaaggaaagcgggaggagagagagtgtgcgcaacacattagcggtcagcgaatcgacgagtgatggaagggggagggggagaccgaccggcttgaggttgggcgaaaggatgcgcatgagcagcggcgcgagctcggtcgcgagtgcgctcgagccataaaggctccggaggacgggcgggatcgcaaggccgagctggtcgatgacttctgcgttggtcgtccgctgctggaaggcctgtcgagtgggaaagagggggagggccaatcagttccggtgcatctgagaggaaacagtgtcagtgcgagctaaccgcacctcgtagtcttgctttggaaactcggccggccgcgtcgcgttcgagtggtttgcaaaatgcgcaaaccacggcgcaaaggcgtagggcaggtagcccatgagctcatacgcctggctcgcgccaatctgccggtcaaagacgtcgtaaaagtgcagccagtcgtgcatcgcgctcacgcggacaaagtcgttgtcctgccacttgaggtttgggtagtgctcaaaagcgcctttccgggaggagcagcatgtcagccggctggccgagaggaaggactcggtcgagcgcaccctgcatgaccttgtcgtactcgccgctcgacgagaccgtttggaccatccggttgacatagcggccctcctccatgccgagcccgaccttctgctttttggccgagacgggcacaaacagcgcgttccagacggcctgcgtcgtcgtccccgagtccttgagaccgaccgccgcgagcttgaccatcgcctcggtcagcaccggcgtccgcgacttgataaactggagcgtattgaggcacgaccggatgtcgcagccggtgacctcggcgagcttggtcaggctccgcgagtcggccgtcaggccctcttcggcgcagacggctttcagtcgtttgacgagaacggcaggcggcggcttgttgaaacgaaccatgcgcgcaaacggccgcagctgccggagcgagggcgcgtagctggccggtgggaagggggagcaatggtcaaaactcagtccttgccgctcgcccgcacactagcttcgaagcctctgactgacagatcgttgcagatgcagatgatgggccgtttgaggagccgtgccggctctgcccggccgtttgccccccgctttcgcgccggcgtgtcctggatcagcttgatcaggcttttgatgaagctctggtcgccgccgccggtcgcgccgtcaatttcgtcaatgacgacgagcgtcggcttcttgctaccgagcgcgctgccggcgtcgagcgcattcttgattcggttcgagacggtcccggcgctccggtcgtcgctgattcgaacccgcagggcagtcagccgcttgcacgggtcgctggcaccgctgggaagagggcgacgcacctcgcattgatttcgaggatgttgtagccggcctggccggcaatgatgttggcgagcgtcgtcttacctagacccggcgggcccgacatgaggaggatctgaggcgggcggagagagaggcggccgtactagtcagcccaacctctgcgacaggagcgcgttgttcgtcgtcgtcgtcgtcggcacgcaccctctccctcggtcggccgagcgggtccagcggcgcgcctccgccttcctcagccgcggcctcggcccgcatgcgcttcttcgatcccgcgccgaaatggcgcttgaagacgcattcgtcccaatgcttgagccaggccatcgtctcgcggttgacgcgctgccaaagtcagcggccgccgtcgctgcaaggtcagctctgcgtaggttcgatgcgagaatcgaccgacgcacctcgtcccccagaaggtcggtaaacttgtctggccgatacttgtcgacccacatgcgcatgctctcagtctcgacctccttgcccttagccgaggctgagcgcgccctgaagatgggtcgcaaggagtgacagccgacgtcagcgcgagagctctgggggtcttcagaagccggcctatcttcccctttgagtgcaggactgaccgagcttccgagccagaggcataagcggtggcagcagcggccgaggcctgctcgtcctcccggagctgctgcttcatccggtgcagcggcgtcgcgagcaggcacatcgagccttgcacatttcgcgggacgttggccatgtcctgcgacattgttgaagggacgagcttgcgcggagtcagctctcgaggctcggccacagcacgagacggacgggcgacaaggggaggggaccgacgtcgaggacggtcgtacgcgtcttctggcgccggcggacatagtgtgcgctgccatcaaaggtcgagacttggatcgtctggagaaaggactgggcagaggtcgagcccgacgctgccgccgacggataatgtgccatcgcgaagaaggaagggaggagtgcgcgagagagaggttgaacgtcgggtcgcgacgcctcgagctcgacgcgtcggagggcagcaagaagaggttcccacgcgcagcaatcctcgggcgaccgcagctggctagccgggctgaacgacagcagctgatgcgatcctcctgcagctcaggtgagcaaagaaggtagaagagcagcgtagggcccggcagctccggctaagcccgttcgagctcttggaaggtggtgagggggagttgccgggtggtagccgccgccattcgccaacggccgctcggctgacgttccgaccagctcgggtcctcggatgcccctcgtcgccacggccagcgctcgcccttcaagacggctcgccttccggctgatttcttcttgtcgacacccttcccccctaccctgaaccatcactccaacccgcaacttactcattttcggtcgacgccaatgctatccactctcgtccgcccaagaggtgcccgccagctgctccggctcgccgccctccgccactacgcgactgcttcctcgtcgtcgacgacctttgtccccggccagccgagccgacctagcatgaagacgagctccttccctggtcccaaagggtacgtctacagacgagctccgtcagctacgccggagcttcggtgtccgcgccatgctgatcacccgtccctcgcggaaccgctcttcgccggaccccccccccctcctcttgccgccacttagcatcgccgcctcgaagcgcattgatgggttccaggacccccgggcgcattcgattgtcgtcgactaccaaaagtcgaagggcaactatctcgtcgacgccgatggcaacgagatgctcgacgtctttgcccagattggtgcggcctgaggcacgccggctgcgcgcgacgacacaaggacgaaagctgaccccgccagccgtcccacccttctcgcagcgtccatcgccgtgggctacaaccaccccgacctgatcaagctcgcaaagacggacgagtttgcaacggcggccatggcgcggccggcgctcggctcgttcccgagcaccgagtgggccgagatcatcgagactggcctgctcaaggtcgccccggccggcctcgaccagctctgcacgatgcagtgcggctcctcggccaacgaggtccgacctggctcgagctcgctcatcagtgattcatccgctgaccgcagctttcccttaccctctccagggcgcaatgaaggccgctttcttagcctacgccaaccggcggcggggcgacgtcgactttacgccagaagagctcgagtcgacgatgcataaccaggcgcctggaacgccggcactctccgtcatgtcgctcaccggcggcttccacggccgcatgctcggctcgctgtcgacaacgcggtcaaaggcgatccacaaggtaccgtcctgtcatggcgagtgagccgaagacaatcgctgacgccccggccttttcgcatatcagatcgacgtccccgcctttgattggccggccgtacgcttcccagagctcaaatacccgctcgccgagcacgaggccgagaaccaggcggcggaggaggcctcgttgaaggcggtcgaggacacgatcgtcgcctggtcggccaagaacccggttgcggccctcatcgtcgaggccatccagtctgagggcggcgaccggcacgcctcgccagcttacttccgcggcctgcgcgcggtgaccaagaagcacggcgtcttcctcatcgtcgacgaggtccagacgggctttggcgcgaccggctctttctgggcgcacgaaaagtgggcgctatctgagccggccgactttgtcacgttctcaaagaaggctcaggcttcgggcttctaccacacgcgggcgacacggccaaagcacgcctaccagcagtacaacacgtggctcgtacgtctttcgaacgcctgaatggtcttgctcggccctgctgatgcacacgcgcctcctaccagggcgaccccatccgtgcgcttcaggctcgcgagatgatccgcatcattgagcgagacgacctcgtcgcccacacggcccggatcggcgcgcacgtctacgagcagctcgaggcgctgcagacggaggccggcaccaagggcctgctcatcaacctccgcggcaaggggtgagtcgaccgtcgctctgtccaaagaggtatagcggctgatcagtcactcctcttgcagtgagggtacctacattgcctttgatctcccgtcatctgcccagcgtgatgcgtgcgtcctgtgtcaagtactgaagccttccattcgctgaccctcccccccctccccctttgccgcactcttccagcttctgcaaggcaatgaagctcgagggaatcaacgtcggcggctgcggctcgcagacggtccggctccgaccgatgctcgtctttggcgagcccgaggccagtgtctttgtcgacgcgacgcggagagttctcgggaacctctgatcgctcgacgagctgccgatgtgaatgtgcgatttagcagggctcacaagcacgcggagatcttgcgcggagttggagacagtgagcagaggaccgtcgaaggcgtaaccacagttgaccctgactctgcgcgggttgcgagtgtcgtgccgtcgactaaaagtagggagtcgagggccccagcacggcatgcaggagtgaaggctcgctgtggagggatagatgttgagtctgctatcatttcttggactacctgacagtggtcaagggcagaagcagggaccagatcaaaaattaagaggttgttgcatatgaagtccactacatttgaacaaataatatattcttattataaaatcgcttaataacaaatgccctatagctcagttggtagagcgttcgactgttatcacgcaatcgagaggtctacggttcaagcccgcatggggcagcattcttttgcctcttttcttgagcgtcggtcggcacccttcaccgactcttctttcgcatcagaggcagcccctgtcatcaagcgtgccctcgctcaggccagcctctcagccctacgagccaacatgaggcgaacggccctgccctggtggtcggcctgcttgcagcctttcaacgttgcgtcgagctctgtaaccgcccgttcccccggcagtcatccgaccttcatatactggccttctcgtggtgccgctcgctagtcatgacgagccagctctgagcccgccgttgtacgcctgcctgcgtacgatctctgttgacgagcaacgtcgagactgttcccggcttttagccctcccccatccggcccttcgacactttaagagaatggccttgtatgcgctagccgctgcctcgtcagcgtcatcgaatgacagagacgcatgggcatcgcgagccaagcgcttggtctgtcccaacggccttccgtcgcctcgtcgtttcagaggttgatgagacccgagccgccgctccctgcctttggcgccgccgctccggcagcgttcgagcgccagaccctgctgtcgccttcaagcgggtgagcgtcggcctcgccgtcggcgtcgtcgtcgtcgctgtcgaggccgaagcggccgacgagcccgtcctcctcgtcggccgtgctcgagatgcgcgagtatgagttcgagcggaacgacgtccagggcttgcgggccgaagagcctcgagcgggccaacagcctccgagcgacggcatcgacgggcgagaaaagctcggcaacgaagggagcaggtcacggccggagagcttgaggatgaagcggctgcaagaggacccggtcaacccaggtgctcgcgcggtgccatcgcctgccgtgcggactcacttgtagagtaggacgccgatgagccaagccaggccaaccactgcgaccataccgacgaagacgacgatcgcgccgacgtcgcccagtaggtgatcgagcgtgcccgacgtcgggcaaccggccgtcgtcgcccattcgaagctgtaggcgcatgcctcgtcgaccggacccgaggccgggtagtgcgagatgaggaccgggccgttctcagcctgaggcgagcagataaagcggatcgtcgtctcgaccgcctggccgccctcacgcgatgctgcgcaggccgggcccgtcagcttgaggaccggcgccggcggctccgtgtttgagaccgtgaggttgtacttcatcgagctgggagcgatggcatgcaggagctcggatcagctcctcgagtcaacgggggaagcagagcgaggaggaggagccctgacggacccaatggaccggtcgcccgaggctgctcggacgaaggctgtgacatcgtcgaccggcgtcccgggcggctggacgttccagagctcggcatggaccggagcgcagagatgcagatggaaggctgtcaagcgggtgggatccacgagtgacaacaggagaggaggagcagtcagcctcggttccgcagggtctgatccggctgagccgctgctcggacgggcctaatccagacgcaatggacgcacccgtcttctccggtgtctcatagaaccagtcctccctgtgagtagaggaaggagtaaggcgaggatcagctctatgctcgtgagcctgggaggaaggccgtcaacccttgcgcagccgaatgtagaccgaagcgagcgacgcacccggcgatggagagtgcgctgaggtcccaggagctcgagccgctcgtgatcgagcaggatggaagttcaggtgatgtcattgctgctgctgagcgagttgatcaggcgaggacggtgagaagaagagggaagggggtggatgtcgacggcacacgtcgtcgtcggcaagaggtgcggcgttcgtctaggcgcttcgccggccgcagcacttgtcatgcgctgcctcacttgccagtcgtcagggtaccgaaagagttacgccacggagccgtaaacaagaggaagaggagcgcgatttgcttgcacgcgcagatgtatcggtacaggcaagggggggggggcgaggtcgtaaagcttcaagaaaggaatagggaggccgcgacgagttcatcaagggtgagcgtgacaggacgtgatgggtttgtacggtaggagagatgggcgagcgacggggcagaggagaccggatggtgcgccggcgcagggtggacggtggtcgggaaagaggagaaggaccgctcgagcgagcagcgcggcgctgcaggagctggtgcgcacggtcgggtaggaggcggaagtggacagaagtcggcgccgtagattcggcagtgcgacgtcggggttgagtgatggagacctggcgcagacaaggaggctagaggaagggccgacatcgacaaggtcagtcggagtgtaggccagggcggggagaagagaagacggaccagaaagaagcagccatcaggccgtatccatgtcccaagacggcgaccactcgacgtcgtcgctgtcgacgaagcggaggccggccttctggaattcgaaagcgattggtgtccagtagatgcgcatgcgcttgtctggtggcaagccgtcgtatcttctaaaggacgagtcggtccggacctcggcaagcgatggtaggcggtccggcgacgaccggacaagatcgacgagcaaccggagctcatttggtttggatgccccgacaatggcgagacttggaagcggttgagcgaagacggatgggaggtcgaccggccgagcctgaggctgcacaggcgccgcatcgagccgaggatgccaggaagcaggacaaagctctcttcggtatgggaactgatggtgatggcctgcaagttcggagccaggcgcaggaggtccagcacgactggctcatcagcctccccgaagccggaaaggctcaggcagcggaggttggcaagggtgagcatcagatcgagaccgaggacatcgggctgcagattcgcgtcgaacaccaagaacagctcctcgagagactgcaagtcaaaaacgcccgagagagcgacggccgcagagaaccataggggtacgtggtgtacacccccgaggaaaacctcgagtatcttcaaccgcagcggcgaggcggggatcgtgccggctggaagaagatcccagaatacgagcgcgctaatccgccggaggtttgagaacatccgcttggcccgggcgatcgcagcgaggtcgaacctttatagtcgaggccgatgttgagagtctgggcatggcgactgagagccggatgggcttgcacaagatcaaacatctgctggagtccatcgagttttgagaagagcaagctctgagcttctttctgacggagagcgcgaggacagtaggtaagcttttcgccatgacttcccagggccaaagctctgacgttcaacgatcgttgaaaagaggggactgacccactaagttgacgagacaaggctgaaggcagaaagcgcctccatccacaccctaggtcttgcccggggccatcggccctggagactgaccgccgcctcacggagtatgaggatctgcagttcgaccggcagttgaggctgctggcgattatgctggtcgacgtttgaggccggtgagagaagtaggcgagcagggcagggccacaggaggtcggtcagcttcgccttgacagaagctcggctagcacgaatgaccggccgaagcggatactcacgagacgaaaggagcggcacatgctggtagcgaggcggtcctgtccggacctaggcgggacggtcctggtgtctgacgagacgggtcgagacaatgatcggacgagagggaaggtcgtagacaggcgcatatgcgtcgggcaagcacacggccgagatgttctgagttatgtttgagtaaaacaacttttttgccactcgcatgaatggtgtagtggtatcacgcaatgttagggtgttctcgtctcattgaggtcctcggttcaatcccgggttcgtgccctttttgcccagcaggccgccagcccgattcgtgttttgccgttcatctcttacttgaaaggcctggcccggagctttgacacatgtgttgctctctaatcagatttacaggtttgacgtttgattgaaggtcgctgtcgtcaactttttgctagtagagcgtccggcctttcagcgtcgtcggccgcaggggcttatcttcgtccaaaactgagagcccgggttgtccgcttgcagcagaagcggcggccgacccggttctcccctcccggcgggaaagcaacagtcaccgcaaacgggcagaccgaaggatcaagacaacatggcagacagcaggtccgatagattggcgggtatacaaaagggggtgataagtgtagattaggggatgagcctggagcggcttttggttgtcggccgtggaaggagtgagaggcgattgtcaaaaggctaggtgctctcaccaacggcctcgacgactgctgctgctgcggcggccgtcgctgcagctgtgtcagaggcagctgcaaagcgcaggacagtgtacgagcctgagccgcttcccccgctgccggagccgcagccatggaccgccccggcatcggcctcaaagtcgcggatgagcgcccagacctcggggttggtcagtgagcggttgcgaccctttggcggcgtaggcgggacggcgagcggcgaaggaagggctggtgatgaggttgctgacgtcgaggtcgatgcaagcgaagaataggtggcggtgagagctggcgtaccggatccgctggccgacttctggagccgcgccgacgagaacgaccgcccggggtgctgctttcgttgctgcgccggatgcgacctgtatgagttgagtgccggccgttgagcgacggacgcgagctcgctcgagctgccgctgccgcggctaagggcggaccgtgtgcgcctgaactgaggcgggatgagcgggacggccggagttgcgacaactgcggtacttgatcgtcgaccgaccgacggaggccgctgctgcagtgagagcaggtcgctggcttccgcccccgctgatgcagtctggcctcgcccatcgttgcccgccgcccctgcaagttccgctctagccgaggtcgagacggtgtcctcgtccattgcagcggcggtagcgagggcctcggcgcggaaggcgggcagagcccggaggacaaagtcgcgttggcttgcgagcgcgaccttggccctgcaaggggaagattggaagcggtcagctatcgggttttgccagggagagtggaagagaaggaaggaaggacgcacgccggcaagaagctcaggctctggaagacgtggaccatctcgtcgtagacctcatgcatgacgtgcacgccctggaggctcgccttgtgggcgaggagcgtaatctcgtcgcgcaggacttcagcttccccgctctggatcaagagcggcggaaggccggtaaagttgccgaagaggggcgaggcgctgcaaatatgacggaaggttgagcaactcgtcagcctttacaagttgagcgtatgtcttgtgcgcaccgggcacgcactaagggtgcgtgaggtacttttttgcgccctcagggccgaggtagcagaggaccgggttgaggtggtcgccgggctccgggatcggcacgatgtcgaagggcgctgcgggatcattgaaagaatgaagatgctgtcaggggcagtgttccggcagagcgacgacctcgctcggggacgcaccgttcgagtcccacgagtcgcacgacagcgtcaggtcgacccaggggctcatgaggattgcgccactcgggagcggatagcctgtaagcgcgaagaaaagagggcagggaccgtcagttcccccgagcagcaggatgatgcaggcaggtcaggactggccgttatcccggaggtagaggagcagcccgaggcagagccccccaccggcgctgtcgcccgcgacgagcagttccggcccgccgggccttccgacgccctccttgtcgcgcagcctcagatacgctagcacggcgtcgtgcagcggccccgggaagcgcgtctcgggcgagagccgatagttgagtgcaaagactcggctttcggtcgcggccgagagccgggcggtcaggttgcggtgggtggaggctgagaaagcgtagtaggcgccgccgtggaggtagaggataacgcgcgggcgttgctgtcggtgcaagcggtcggtcggcgtcatcaggcccgccgaggaggctgacgacgagcgtgacggcaggcgagcggtcggagtcgagctggatctgctgtcgctgctggggctgctaccgtcggcggctgctgcagggcttggactagccgacctgcgccagtcggcctgccatgctcgccagagcggtttgtcgacgacccactcaccggcgagccaacgcgcgccggccagctgcggcgctgagccctctacatcctcgggtgctcgatcgcctactgctgctgccggtgatgaaccctccgttcttactgtcgtcggagtcgccgccagaggtcggaaatcgctccctccgagctcctcgcggtcaaatgattcgagtaggccccgaagcgcacgtgaccggacgacgaacgacaaaggagtgacggagggcgcctcgcccgggccagtcgaagggaggtaagccgaaagcgaggttagggcgcggatgaaggcctgagatgaggcacgaagcaaaggcaatagacggtcagctaaagcgacggaagggccttgctgaaggacgggtctcggctgagacagagacagaggcgggcgggcaagggccttccctcctcgcaggaagggacgcacgatgtcggctaaggaggagtgcttgccggcgtcgcggaggaacgaggtgatgagcgtcatcctgtgcgagcgagaggaagtgcgggcggtcagcctggctcagagagaggggcgccgagaggggtcgctgcgcggcgagcaggacaagctacagcacgggacgagttgagcaagacggggacgcactcgacgccccaggacggtttccgaggaccatagaatccatgagtgatgagctcgctcgtgagatggccggctgccgaggagcatagaagggatcaaggtcagtctcagcaacgacgcgtcagcccgccgctgacggactcactcttgtgggcgacgagctttgtgagctggacgacgtcggcgagcccccagccacggagaaacggcctgccctgtcgctgaacgagcgagggatcggtccgtgcgctctttgggagggcctgggacgagaacgggtcgagctgggcgaggagcgacatggctgacaggagggaaggctgtcaccagggtcggggtcccctccgaccctccgcgctcaacttctcgaccgcaacgctccaagacggcttgccgggcaagacggtcgccggagcccgtccctccctagcaaggctgactgactagcctgacggatcgttgcccactgaccgcgacctcgtacctccgccctgccttgctcgccgctctcgccgccggccgccttccctctcgctctctttcggctccgacagacgaaccagcgtcacctcctcctctgctccacctcgccgcctctcgatggcccgctcgtcgctcgccctcaccattgcggctgcggccgctgtcctgctcgcagcgaccgtcctggagcccgtcgccgcgctcgatgccgccggctggcgttcgcaacagatctaccaggtgcgtccctccgacgctgtaccgtcttttggcacgagcttcggacgacgctcgcagggagtctgaccgcttccttcctctgcctgctccgacggcaggtcattaccgaccgcttcgcaaggccggccaatgcgaccgccgcctgcaacgtcaacgaccgcaagtactgcggcgggacacaccaggcgctgatcgagaagctcgactacatccagcagctgggcttctcggccgtctggatcagcccggtcgtctccaacattggcgggacgacggcctatggcgaggcctaccacgggtacgcccacccgacgctgccgccttctatctgcgcgacctcgctgacgccctcgcgctttctctctctccgcccagttactggacgctcgacgtcgccgagctcaacactcactttggcgacgccgacgacctcaaggcgctctctgccgcccttcacgcccggggcatgaagctcatggtcgacattgtcgtcaaccacgtcgccgcgacgtcggccgccaccttcaagacgtcggccgactacgggccgtttgatgagatgggcgacttccatcctttctgctgggtcaacccgaagagctacgaggtggccacgctaaatcagacggacattgaggagtgtgcgtctggcctcgagtcgaaatgagaagcgtgcgacacgctgacgcccgatccttctctcccgccggtctgcaggctggcttggcgacaagagcgttgcgctcgtcgacatcaacaccgaggaccagacagtcgtcgactactattcggcctgggtcaagcagtttgtcgccgactactcgtacgtcctcttcttgcagcagggccatcgagctatctcttcggccgagctgacccgttctaaaacaggatcgacggcctccggatcgacacggtcaagcacgtccggaaggatttctggccggccttcactgaggcctcgggcgtctatacgatcggcgaggtactcgacgggagcgtcgagtattgcgcgccgtataccgatgttagtctcttgctcgcccgacggcccgagagtctggctcagcccgctgacgtgctttagctcctcgtttcttccaggtcatggacagtatcctcaactacccggcctactttcaaattcttgacgcctttggctcgacaaacggctcgatcccgaagctcgccgacgtgcacgaccagctgaaattggctgtcaaggacacgtcgctcctcggcggcttcacagagtgccatgatcaggtccgcgtgccgtcgttcgtcgatgacgcgacactcgtctccaacatcatcgcctacccgttcgtctcggacgggatcccgatcctgtattacggccaggagcagggcttcagcggcggcgaggacccggcgaaccgcgagccgatgtggccgtcaaactacgacacagcgagcgacggctaccgctttgttcagttgctgacggccgttcggtctgccgccggcaacgcctcggccgacttctacacgactcaggtcggtccgttcgcgcgcaacatgccccttcagttcgctagtactgatgcctctcttacgactcgcgcttccacagtcatctatcgccggccagacggcgcaggacctcgtcatctccaagaccccgcttgtctcggtcttgacgaaccgcggctcgtccggcgcgtctggtgccgtcatcatcccctccaacgcctcgctcccgcactcgacggccgtcgtcgacgtaacgacctgtacgcgctggacgacggcctcagacggtggatcgaccgtcaccgttgctggcggaaagccgctgttcatcctgtccgagagcgcgctcggaagcctttgcagcggtggcgtcaccgactcgacgaccaacaagggcacgaccgacgccgaggcgggcgtctcgggcgtcggcagcagcggcggcagcggcagcggtggcggaggcggcgactcggccgcatcgcctcgagtcagcatcgaacggtcggccgttaggcttttcgtcggctttgcattggctgccctcgtcggtgctctcgtctgaggctctcgcgcctggaagcgcccgggacctcgttaacaaacggttgcccctctcctcatagatgtcttgtcctttcccacccatagatgcgctctccatagacgcctgccaccggcaggcccccctgtatcgataaagtttctcatacacgcgctcgctcaagagccgggtcacgtgagagaagggctcatcaagatctcaggcgatgactgctgccgccggcgtccgcttcggtcggcccatgccgtgccgaggcgtccaaggtccgagcgagtcgtcggcgtaaaagtccatcgggtacgtctcctgggtgttgcccttgaagccagcctcccagccagccttgcccgactggcgatcgacctggccaacccgaccgacggcgagtgcggcttcgtacggcgtcagcaccggccgagcaaaggccatgccccagtcgatcgacaaccgagggcacgacgtttggacaaaggtgctgatcgaaggcggaaacatggccagcttggccggcgagagctcgctgatgaggatcggcagcggcgggtggatcgagagagccgtctttggaatcgagctcgtgatgctctgtaggaaaggggccagtcagcactggacgagcgttgtcgaacgctcttccgactcacattgagaacgctgacgctgccctgccggccgagcgtgccgaggacgacggcccaggcgccgcttcctttgccatcctcgagctcgccagcaggattcccagccgagccgacgagcgatttgcgcgcccgaccaaccgcctcggcccggacctcgcgcatctcggcgtggtcgtagatttcgcgcgtgaacttcttgtcgtacgggtcgtagcgaaaagcggagaccgttgggttggcgatcatgatcgattcgaggtgaaagcggccgtcgccgacgtagctatggcaccgagggtttcaggtcagcgcattgcctcgctcggactaaggccgcctttcccccggagcgttcagggaacgcacatcagggcatccacgtcgtccgccaggcgcggggccgtgcagccgagaatctcgccgggcgagagaggccgtgactgggggacgacaatctcgtacttgccgcgccagagtcgacggtcgacctcggcagcctcatcgacagccgtcgaccgcttgacgagcgcggccttgtccgcctctgccgcggaaggcgagggcgcatcggcagcggcgtcttcggccaaaggcgggagagctgcttcgagcgccgtgcgaaggtgctggacggcagcgacaaactggatggtcgagacgagcgcgagcttggtcggcacaggtgcctcttgggtagtcgagagggctaatgtcggaccgctcctttcaccgactgactcatcaaccgagggctctagagcgatctgggccttgcccttctgtgcctcgtcatccctcgcgcgatcgacctcgtcacggtcgaccatgtcgcctgctctgcctcgacgagcgtcaagcacgccgcgccggaaggccaccttgtccgaaggaaaggcggtccgaacagtagatgagaggtggaccatgtcgatcgcgatctcaacaaaaacgtagagcgtcttgagcgtcgtttgcgttgtcgggactgtgggcgtcaagggcaggatcagccgggcctgctcgtcactctgttcgatccgacgcggacgcactgaggcacgagtggccgtagtggacgatcatgtcggcgccaagcgacttggccgtaaaatcgtcaatgcagcacgcgccgtacgtgacatcctaaggcgaggtgagcggtcgatcagcttttgggctgttagcgggtcgggactgctgcacttcggcaggcactcacggccagcaggatcggatgagcgccggtgaagctgaaagaagttcggagggtcagctcagactgcctcaaaggcgcatgggcgtacatcgagccggccgcaccgctcaaggatgtctccgatcaggcaaccatagatcatgaggccttcaggcatctggagcgcgaccgccttgacgctgtcgcgccggatctggtggaccgtcttgtggatctgcaagaaggcatcgttccggtcaaacagtgaatgtgcgatatacagcagccccctctcgacctcttcagcgtgcaagtcgcacctcaaagttgtagttggatgggagcagccggatagcctcgttcagctctgggtcctcgagaatcccggccggcacctggttgagcggcactcggggcgccgaccgcttgccagcaccaccgttcgacgaagggttggccgtgccgacaaagcgcttgcgaggctttgaggcggacgtcttgggcctggaacgtgaggcaaaggtgtgtgcgaggaggtcgacggggtcagccgagggatgagcgacgattggagcgcaacccggcgaggcctcttccgccctggcgtctcaagaacgatacgcacttggaaggcccggcctcgggaagagcctgttcagatgtcattgggtagggaaaaacgagcgagatcgaggagagcaggtcggggaggaaggttcggggtcgactcctgctgaccgccttcaaatcggaacctcgccaacaacgcgcagtaagcggcagcgcaagctctcgcatgtcccgacgtctgcctgtccacatcgaccctcgtcaggacggaccccatgcgtagcttcgaactcaaggttgtcctgcttttcgccagccttctcgcggcgctcctcttccgcatctacgcttcacgaatcgcgcgtgccaagatgacgcccgcaacggacgagcccgagctgcggccgccaggtgcgtcgagctgccctcgctgccatcgatcccgagccagccgctctacggatgacaaacgctgaaactggcatgatattggcagcctactcgctgtggtttgcaccggcgacctcgtcatcgtccgccgccgtctttgcagctctcaacgcctcccttccgggtccaaccttcccatcgcatgcgaccctgctcggctccgctccgaagggggcggcactcgagcatatcgtcgagggtgtccgcaagtctctcgacgtctggcgcggctcgaagcgtagggagggagacgggctcgaggtgccgctggaggacgtccgcatcggcgacgagttcttccgctgcgtgctcgtcaagctcgttggtgagtagtcacgtcgctctgctgccgcctctggccgctcgcgtcgcaagacggaagagtggaggtgctgccagagtgatagtgttgattgactgcccttctcctaactcgctcacgacgctcatccgctttgccgggcgtagacgaccgggcactgcacgcgcttcacgacgccgtcctgcagcaacttccatcaccatcggagcggaagacctacctgccacacgtctccctcgtctatagcgacatgccaatcgagcagcgcaagcaggtcgtcgctggcctctatgcttcaggccaggcgcgcgaggtctacgggccacaggcaggagtcgagctgcgtgccctcgggcaggaggagcacggcgtgcgctcggttctcttcgaccgggtcgtagtcgtcgccaccaaggatgttccgccggagcagtggaatccggtcgccgaggtcttcatctgagggccggggactgaacgggacgaggggagactgcgcgacaggcgtcaacatgaccatgccgttttttatccggttcgcccttcggttgcgaaggagcgcgtctaagcaaatgagcagtgcagtcgccgccgttctgtgaccgcaagtacagcagcttgccgagttgcttgctgtcggtgagcagagcaaccggcaagcgcagccaattcgacgcttgaagctccgagccgccgctctccgccgacgtccacctgccttccctggctccctccgcccttcccctcactcgtcatggcgaccgctctgagcgacacgctcgagaagctcgacctcggccgatcaacaaacggcaagccaactgccgaggacggcgtctcgtcgtccggcgcggcttctgacgccggcggcggctccgacgccgaggcagacgacgacccctcgcctgacgccggctcaagcagcaagaagaagaagaagaagaagcccaaaaagaagaagactgctgctgctgatgctggtgtgccgctcgtccagagcgagccgccccgggtcgggctcggcaagatcttcctcgacggcgtgttcccggtcggggaggaggaggagtaccgcgaagagtgagccgagccgaggctcctcgttgcctttcttgagcgacaaggggctgacgtctgaccgctcgtccgacctcaggaacgcctatcgttactcgtcggccgaactcaaggccaaggaggctgcgctgcagagctcgccagacgagacgtacagcgcgatccgccgagcggccgaggtgcaccggcaggtgcgggcctatgcacgcaagacgatccgccccggcatgtccatgaccgagattgccgagctcatcgaggacggcacgcgggcgcttgtcgaagagaacgggctcgagtcgggcgtcggctttccgaccggcctctcggtcaacgactgtgccgcgcactacagtgtgtgccgacctgcttcccggtcgacctcgcagaggccggaagactgacgaggcttccggacttttgcccatctcacagcgccgaatgccggcgacaagcaggtgctccagccaggcgacatcctcaaggtcgacttcggcgttcatgtcggcggccgcatcgtcgactcagcctttaccctcacgtttgagccctcaccgtacgacgagctcatcaaggccgtcaaggaggcgaccaacacgggcattcgcgtgcgtgccttcggctgacctgtcgatcgcgctgcatcggctgacaacctcgccttacaggaggctggcatcgacgtccggctgtgcgacattggggctagcatccaggaggtcatggagtcgtacgaggtcgttcttggctcgaacacgaagcaaggttcgtgagaggccgcagtgaacacggagattctttgctaaccctggccgacgctggcgccgccgcctccagtcaagtcgatcgccaacctctgcggccacaacattggcctgtacgaaatccacggcggcaagtcggtcccaatcgtcaagaacgacgacgagaccaagatggaggagggagaatgtgcgttcatcgtcgcctttgaaggagctcgaccgcagcctgacgattcgacttccagactttgcaatcgagaccttcgggtcgactggtcggggccgtgtcgtcgagcagggtacttcgtcgcattatgcccgcaacaagacctacgacgctcggcagctcaagtacgtcaccagtctgcgcttatgcggctttcgtcccccctcctgacctcattcgtgcgcgtccttgtcaggcgcgagagctcaaagagcctgctcaagacgatcaactcgacttttggcacgctgccttggtgccggagatacctcgaccggatcggcgagactggctacctgctcggcctgaacgagctcgtcaaccaagacatcgtccaggactatccgccgctacacgacgaacgcgggtcagtccctatgctttccggcccttgtcgtggtcgatgagctctcactgacacctggcccgatccagctcgatgacggcccagtttgagcacacgatcctcctccggccgacatgcaaggagattgtctcgcgcggcgccgactattgatgggcagtgacgacaaaagagcatgcagagattggcggcctcactcggcgaccatgtcggcaagcgagtcgcggaaggtgcgcttgggcggcgccagctcgaggatagcttgactcgtcggcttgctgagagcgaggccgctctttccagcgagaaggagttttgtgaccgttcgcaaggtcgagatcgtcttggcaggagcgctggccgaggccatgaactcgatccacgtcgtgtcctcgtactcgaccccggtcgcctttgtgcccgtcagccgctcggcctcggcaacgacgtccttcccggtgacgtcctcgggtccgttgagggtgtagaactggctcgcgtgtagcgacggatcggcgagcgcgagcagcttgccagcagcgatgccgacgtcactcggatcaatcaccgcgaccggaccgctctcggcggcaaagagcatcttgaagggaccgagcttgccggtcgttcggtgagccttgatggcttcggcggtcgtgccaaggaacataggtccaaagaggttgggccggagcgaggtccacttgagggcgtcgaaggcgggttcggagagcatgcgctcgatcgcccagtgggtgcgagcgtagtatacggggctcgctgggctgatcacgtggccagtctgagggaagatgagaggccgacgaggtcagttgaagttccagggtaacggtgaggctgaggaagcgctgaccgtcgagatccggacggcgtactcgacgccggcttcgagcaaagcgacgaagagcagcgactcgtccgtgaactggctgtcctcgttgtgcgaagcaacgaatgccttgacgatgttgcgctccttgagccaggcggcgtcaatttcgggccagagctttgcctccatctcgacgaggggtagtgcggcgagcgacttggctgaagcgctgtcggtcgaccgcgacaggccgaggacacggatgttttggccggcaagctcaacagagagcgtttggacgacgctgcggccagtgtttccggttgcgccgacgacgagcacggtgcggggggcagagggcatctgtcggggcaaggaggttgtggtaagaagcctgacgtggcctagcggagcggcgcacacttgcccatgagcacctttttgggttgtagagggagaggtaggggccagggacagaggttggtggggagatgggagagaagagggcggccggctcgcggtggggctcgaactttcagaggtcggcgccctgccatccgggtgagtaaccggccaggatgggtgagtacccggcaaggctcgcagacagcgatcgctttgtcaagtgagtcagccagatgttcgcccgagatgctcgtcagcgagcgagattgacgtttttgaaccttttttttagcgaggtgcggctgacggtcgtcgacgctgagtaccggctgctgctccgccaggccagccttgactgccgacgcccagctatctctcggtcagacacgagatgcctagcgatcatgatatgtacgagaacaagtagcggcgagtaaagataggggagagtgtcttgatgctgcctcagcggtcgacctcgcctgaaagtcgaagcggcagcgcctggttagtccggaacgtcagagcgacaggattgaaaaaaaaaaacgcgatgtaccgaagacgagatcgagcgtgccgatcagggcaaccatgtcaggcaggtagcagttgcggctcatgaagtcggcgccctgaaggtgggcaaagccaggcgcgcggatcttgcagcggtatggccggttcgagccgtcactgcgtgcccagaggagagaggaggggtcagctgcggaacgttgctgagggcaagaggcgcaggctgtggacgcacgagacaaggaagacggccatctcgcccttgggggcctcgatcgccgtgtacgtctcgccaggcgggacggcgtagccctcgctaaagagcttgaagtggtggatgagcgactccatgctctccttcatggccgctcgcggcggcgggacaatcttgttgtcgtccgtcttgatcgcgccctccggcatcttgttgatgcactggttgatgatgcggagcgactcgcgcctagggcaagcgagaagtacgaccgtgtcagctaccggcgtcgagcgcaggctgcggcgagcgacgcgacgcacatctcctggacacggcataggtagcggtcaaagcagtcgccgtgaacgccgacggggatgtcaaactcgacctcgtcgtacttgtcgtacggggcgaccttcctgtgaaggcacaagatgacacagcgtcagcgaacaacgaacgaggcacagacgtgcagaaggcaatcaggacggaccggatgtcccaaggcacaccgctaccacgaagcatgacgcccgagaagccgtactcctgggcctccttaacggtaacgtttccgatgccccgcgtccgctggatccagatccggttgccactgaggagctcctcgacctcgtcaagccggcccgagaactgggtcgcccagatgaagatgtcgttgagcatgccgtgcggcatgtcaaaggcgacgccacccggccggatgtaggcggcgtgcatgcgcgcgcccgagacgcgctcatagaactccatcagcttctcacgctcctcaaaaccccacaggaagctgtagagagacgatgcaaacgggagaagtcagcatggcggcaaagggcgtcaagacagaggaggccagccacgaacggggtgagcgcgccgacgtccatcgcgtgcgtgaggacggccatcaagtggttcaggatgcgggtgatctcgccaaagagcgtccggatccactttgcgcgctcgggcgcctcaatgttgagcagcttctcgacggccagcgtgtagcagagctcgttcgtcactgaatagcaggccaacttcagtcagctttgcttgggcgcgagcgcggatgcccatcggacgcactcatcgagacgtagtcgagccggtcgaagtaaggcagcgcctgcgtgtagttcttgtactcgatgagcttctcagttccacggtgcagcaggccaatgtgactgacgcgagctgaagcggtcagcacggactctctagatgagagacagaggcaacagggacgaacgggtcggcccggaggatctgctcgccgttaacctcgagaatgagacgcaaaacaccatgcgcagccgggtgctgcgggccgaagttgactgagagagcgagttgtcgagggtcagcgaggccgggctaggcgttcaaagaccagctaaagcgagggctgagccgaggacgcacccgtcaggtgccgcatcttgcggtcggtcgtcgacgagtgctgggcagtcgtagcccgctcgcgctcggtcgggtagtgcctgggaaacgaccaagggtggatggtcgtcagcacaagcaacgcttggacgagacgaacggtgcacgagagcggttgagaggcggtttgcggcgggcaaggtggtgtggtggtggtgagcgagctccgtggccgatcgggggcccaaagccggacctcctcgaggcatgatgcccgtagacatgctacccccagctgtagcgtgcagccagtgcgccacagccagcatggcagaactggaaggagggatggggaccacctcgacgcccgatcgccggccgacagccctggttgcggctcgggagctcgaggcagctcgggcgcgcctgctcttgctccctgcccaactctagtcacacctctggcagacgataggatcggacgcacgggagagcctcgtcgccggtcgccttgttctggctgttctgaagctcggtccagtggaggctctcgcgccggacgtggtcgtcccggagcggctcgctctgcagcgaggtcgacctgcgaaggagggggccggcggcgaacgacgacgacgaggccgacggcaccgacgggccgagccgaatcgagcgggcggcgagggagcggagcatcgcgacgtagctctctgaaagggtaagggcggtggtggtgggacgaaggggctgaaggcgccgaccagattggctgggccatcgcggcggccaggcgggccgggcgaggcgaaatgggcgaccgcgtttttcgacccccaagcgtcggggctttcctttgaggacccagcgacgacaactgacgcaaacggcactgaacgaagctagaaatgtcataagaaagacgcaatcactcaaggtcggccggagtgacgccaatgtgggcggcgttgtaaaagttttgcgacggctgccaggccatgacaatgttgtcctcggccgtgctcgcgaggcaccactccttgttcgggttccagctgaggtcgctcggtcgggccgtgtgtccgccgtggacaaagaggagctcgggcggcccgtcgtcctggtcgtccggcgtctgctcctcgccaatctggctaatgtcccagaggttgacacgccggtccgacgacgacgacgcaaagaccgtctccgagtggggcgaccaggcgagctggatgacctcatccgtgtgcgactcgaacgagtggagcttggccgagaggttgcggagatcccagaggccgatcgtcttgtcgcccgagcccgtcaggagcaggtttggcgacgccggcgagaaggcaaccgcgttgacctcggccgtgtgcgcctcgaccgcgtgtgacggcttgacggtcgagtcggaccgggtgtcccagctgaaagaggaaggtcgtcagtctgaagccggcgaatgcgaggagggcagcgaaagccgacgcacatcatcagctgccggtcgtcgccgcacgaggcaaacaggtactccttctcgttgtgccaggccacgtcctggcaaggaaagcagcgtcagcgaacgaagtccggagcaggtcgtgatcggatgacgcacctcgacgatcgaggtgtgaccgcggtacgtgttgatcgggtcgaccgagccgctgctcttggcgtagccgttgatgtccctggtcgcgagtagaagagacgtcagattgatgccagcacgcgtgccgtcttgcagagtgatactgaccagtggcagacagtcatgtcctccgaggcagagagaacgtggccggccttgacggtcgaccagctcaggccgtagctgtacgagcaggacagacaatcgtcagcggcagacaaacactgactggtccagccgcgcgcagagggacgcacccttcgcggctctggcccgtcaggcggatgtctggcttgcagccagccccagcgccagcctcgctcgcgtgcttcgtccggtcaaagacaaagacctcgcccgaggtcgtcttggtcgcaagcaggttggggttctgtggcatgtagcgcgcccggttgatctcgcccgcgtggttgatcgtctggatgaccttgagccgcgctggcgggcccgtgtgcgagccaatctctgcaggggcggcaagtcgcgtcacgtcagagacccaagagagctcgataagaggcgctcgtcgaggcgcagagacaccgagagactagtgttgaccaagcccctgatcctgccaggcccgttagaaagaaacctgaacgcacctccccgttcgtcgtcgtactcctgcagcgtgccctcgaccgcttttgggatcgcgacctgggcaatgatgagctggtcctgcgcctggccagacgtgtgcgtgccgagaaggatccggtggagcgtgtagtcggcgccttcgggcctgtagggcgaacaattgcgagtacgaggggtagtaagtagtaatgatcgtcagctcacgagcagcatgcaagcaggcttcgagccaaggggacgcacgcctcgacgtccgggaaccactgacacgtcaacgacggccacgtcagggcgtgcgtgagaacctggtcgtagaggaacggcgtgttcttcttccagattttgtactcctgtggattcgtagaatataatggggtggggcgggggaagcggatcagctcgctgggtcggcgcaggcggcggcgcgtccatcgcgtcgtcggtccctccgacgtgcagtaccggcggtcggcaaggccgcaagcccctcatccaggctgctcttacgcggcatgtcgagcagctttctgacagaagagaacgaacctcgttgatgacctggttctcgccggacgggtcgacctcgtcgtcgtcaatgctgatgggcacctgggcggacgccatcctggagggcgagctgagctggcggcggcggtgcgacctgcgagggatgcgattgagttggcgatgagttcgacgcggtctcgactggctgggcgagcgaggaaagatttgaggtctgctagagagtagagtacgagctgggctgggatgaaggttgaggtcgaggcgacagggcgaaaacccctttgctctggtgcgcccggggcggaggtgagaggccaacctcgtacgggctgcctcggctcttgcgtcgagccgtcctcccctccgaccttgaccgaccacccagctcgccatgcagttctggaagcccggcacggccgcacccggctcgacagccgaccgcgagtccgaggctgagggcggcctgctggttcctccggcggccaacaagttcgccaacctctcactccaggcgcagcgcgaacggctgcccatcttccgacaccgtcagcgagctgccttcgttctttccgccggcttgttgctgaacccactttcaatctttctttccaggcgacaagctgctctacgctattgagaagtacccgatcgtgatcgtcgtcggccagaccggctgtggcaagacaacccgtacgtcgtgcagctctcggcctgcgcgcgcctgggacctcgcccgggcttggcgtcgacgaagagtctgcttgctgaccttgagttccccttcttgctgtccggctactgtcctcacccgctgacagagctcccgcagtacttgcacgaggctggctgggccgccgagggcaaggtgatcggctgcacgcagccgcggcgggtcgcagccacgacggtcgccgggcgagtcgcagaggagatgggctcggtgctgggtgacgaggtcggtcggccatgatgtggacttttgcaggtagagactgtcgctgagtctcgcctgtgcccgccaggtcggctacacgatccgcttcgaagacatgtcgagcccggcgaggacgcgcatcaagtacctgacggacggcatgctcttccgagagtgtatgctcgacccgctcctgtccaagtacagcgtcataatggtgcgtcgcgccgatttgctctggtgtgtgcgcttggccgacacttctgactcgacgccccccccctcaagattgacgaggcgcatgagcgtggagtgtacaccgacctcctgctcggagtgctcaagaagtgcgtcccacaagctgctttctcatcgctttgacgaaggctaatccgtgattttctacctgacaggatccggaagaagcgcaaggacctccgcatcatcatctcctcggcaacgattgatgcgtgcgtccccactcccccttcatccgcaggaggctctgctgcggcaatcagcgctgatgacctgctctctctctctcttctgctccagcgaggctttccaagcctacttcaactcaaacgtgcacgacaccggccgcagctctgagagcgaaagctgcagtgcgtgccctcgaacctccgccccgtgccagactggctgacgcgagctgactcggccgaccctgccctccagtcatttcgctcgagggtcgcatgtaccctgtgcagctggcttacctcgccgagccgacgaccgactacgtcgatgccgccgttcagaccgcttttaacatccatgcgcgcgagccaaagggtgacatcctcgtcttccttaccggccgcgaggagatcgatcggtgtctccaggagattgcggaccggctgccctcgtgagtcgtttgtgcagcgtctcttggataggctcaagctaatgccacccagcgcctcgcctcactccttcgcagcatgccgaaagcattgcccaaattgacggccctgggactgcacgccggcctgtcggctgacgatcaggcgctcgtttttgcgccgacaagctcgaacgagcgaaaggtgatcgtcagcaccaacattgccgaagcgagtgtgacgatcgacggcatcgtctacgtcgtcgactgcggctttgtcaagcttcggcggtacgacgcggcgctcggaatggatattctaggcatcgagcggtgctcggtcgcgagtcttaaccagcgggccggtcgagcgggccgcctgtcgccgggcaagtgtctgcgactgttcccagcctctgacctggcgactctcgaaccaagcacaccacctgaggtcacgcgagccgacgtcgctctgccgctgctccagctcaaggcgctcggcatccgtgacccgatcaagggcttcgactggcttacgcggccgagcccgcaggcgttcagccgagctgtcgagtttttgacgacgctcggagcgctcgacgagggaggccggctacgcaagccagagggcgaggcgatgagcgagatgccggtcgacgtccagatggctgcgatcgtgtgtgcccggcactgcgagccgtcctgccaactgaggctgactcttgctttgcgtttgcacagctcctcaactcgcaaaagtaccgctgcggcgaggagatcctctcgatcgctgccatgacttcggtccagaatgttttcgtcactggcgagggccaggcgggcgcttacgcagagctcgagaagcgcaagttcacggccgaggaaggagtgcgccgtgctgccgctcttctcgcttgctgcatcggcctgacccttttttccgcgtgtgccatccaggaccatctgacgctgctgaatggtacgtctcggcagaatgctcgtgcttgttcttgttgctgatctgccctacttgcagtgttcaacgcgttcaccaagtttggcgggtcgtcggccaagtggtgctcgacccatcgaatcaacttcaaagctttgtcgcgcgcagtgacgatccgggctcagctgaagaagtacctcttgcgtttcacgccgaaaggcgcgcggatcgagagctgcgaaggcgaccacaagcggttgcgcaagtgccttggtgagttgcctcgacgctgtcgcgcttctgccttcctgccggcggctgactgttcagccaatttcgcagtcaccggctacttcaagaacgccgctcggtggaacgctgccgagggcacgtacatatctgtgcgcgaaaacacggtgcgtcttgcagcagcttcttggctcaatgcagcagctccttggcttaagaggtgagcgctgaccatggaccaatccttgccaggtcctccacgtccacccatcgtcggtcctctttacgcgtcagccgtcgacaggctgggtcgtctaccacgaggtcatgcagacgacaaagagcttcatccgcgacctgacggtcgtcgagaaggattggttcgcagagttggcgtgcgtgcattggttcgctcatcgttagtttcttcgactaacgaccttcgttcgtcctccaggccccacttctactacatcaaggaggcgcgcaggatatgatgacgacttaacgaccagaattggcgcgacgtgcagcacgctccatctcgatctctcccctgcggcagtgcttctaccggcgccgttttcaaacccaccagctcctggacccccgtcgcgcgcgaacgcgccctcgcaatagcgatcagcaccccacacgctcgtcgcgctctcttaacacactcagtcgatccgacagcggtgcatcttggtcaaagtcggagccgcaagtggcccgcgtgctcgatggttcgacggtagccggcgggggggagtgcaccgcatctgagcgaagcggtggcggttgacccctgacgtggagaacgcgacgcggttcggacgtagggcacagggtagctacggcggtacctgaggtagcctatggttcggcagccggttctgatgaggtcgcttcaggtcaccgctggaagggcgtccgcgagcagagtcagcccggcgcgccgtcgaccgggaggcgcagacagatggtagcaggagactggcggcgggactgacctttagacgagaagcaaagggacaggagagggtcagcaaaagcgtcgcaggccggtgatgaacgagacgcaccggcaaaagcgactaggttggcgcttggctagggagagaacctttacaagcggcccagggcgtcgggtttctagggttagggtttagggttactgcagcatcgaatagtgtaaggcaaggtcaaggagaggcgggacgggcacagagacgaacgggttagggtcgggtcggctgcctaggggtagagtggtcggaggaggggagtcgtcgagagggggaagagaggcgcgagagaaagagctacggaagggggaagggggcacacggaagcagagggtgaaggaagacggagcggaagagacgcggaagagagaggagccaatgagacaaaagagagatgaaacgagcggcgggagagcgcgaccaagtctagacaggccgaacgaccgacatcctgaaccagacaggggctaaggccggacgatcagagtcgaccgagccgggcccgggctcggacgaggatgaggttcttttagggttagggttagggtgtaacgggcatgcaatgacaaaggcgggtctacggacgggaggcgaggagttcgagagctagacgagaggaggagacggaggcggaggaagggagcgcaacttaaaaggcgaagaagcgagcacgcgcccgaagaagtgagagagagaggaggcgggagaagagaccgtacgacggcatgagggcgcgccagtggtcgaagagggggacagaggcgggggagagggtgccggcggtagagaggacgagagggaagaaaggggtggcggtgcgaccgaggtacttggggggggtctttagggatacagtcaacacgagatcggatcaggcagtggggtggcgtgtattgcgggtcaagggaggggccgaaggcgcggacatgatcccgcgccgacgaatgcgacatctctggccgtggctgtactgccgtcaagggcccccgctctagtagcgagcggccgagccagtcgtctgcgtatatgccggctcgatcggcggcgcaagctcgacgtcgccgccgtgcggctggtacatcggcgaggggtggacggcaggcggcgcgggcgagccgagcgggtgcgcggccgtcgggaagtggctaacggggccggcgtggttcgagacggccgacggctggcgatcgggcatcgcatagacgttctgctgctgcggcgccggggggtcagggaggtaggcgccgttcgtgtcggccggaaagccgccgttggtcgcgctcgggtagccggcgaccgggtggacataagccgacgtcatggccggcccgcccgtcattgggtcgcgctcgagcccgtcgaaccggccgttgcgctcggcgccagacggcgggacgacggtcgggatcgcgcccggctcgattccgagctttgcgagcgcctggccctcccacttcgccatccgacggaggtagcggggcgaggacttcgacgccggccagaggtcgaggacgagcgtgaagaagtaggcgtcgaggacgagtgcgatcgaccactcgagcacggccgcggccgacgtcagtcggttgcccttggccgagacggccgggtcgggcgactcgatatcgttgcgcttgccgaaagcatagaggacgccaaacgtgatagccatgcagatggcgagcgtgacaatgatcagcttgaggacggcgttgcggaggaggtgcgaccggtccgggtggtccttcttgagggcgaggatctcgagcgtctggaagacggccgagatggcgacgcagaggacaaagagacctgtcccgacccagtggacggtcgggctgtcggataggcaggcgtcaatacgggcaaaaggggtgtatgctgccaagtctagggtccgcggacgcactagctgtagcagttgaaggccgagaggacgacgagggcggcggaaccgatgcagcagaagatgatggcgcacaggtcgtagatgacgacccgccggttgcggacgccatgcgccgggatccgatcgacgtgccggagccagcgctcggcgacaaggctcgaaatgtactgtggacaaagggagaagcacggcgtcagcaagcgaggaatgggagcgaaggagggtcagacacacaaagaaggcggtgacgacgcagatgcagatgaactaattgttggcggagcggagaaagtcagcatcgaggagtgagcgctcgcaggcgagaccctcaagacacgcaccagcgtctggtggtaagcgccgacgttagagatgtaggcgatgccggccgagtcctcctcgtagcgcggcgtaccggcggcagcccagacacccataagggcagcgaggcctacgaagtggaagaagagggaggggcgtcgtcagtctcctgagtggctggccggctggtgcagctgctgcgggcaagcgcgagagtggttcgaacgccgcgcagaggaacagcggcccgcccaaatagtgaagagcagaacgcaggacgccctataagaccaagagagaggaccgacctccgagccagacgagggcagtgatcagcggcaagaggacgtagggcccatagacgccgcgcaggagggccggcggcttgccgatgtcggcctccttgttggccgtcagcgcttgagggtcgatccgggtgacggacgaggcggaggacatggctgttgagcgggtgctgtgctgggtgttgatctgctagggctctctaggatatgtcggacggagggcgacaggaggaggcgtcgaggttgaagggcgagccagaagagcgggctcggatttcgcactcgtcggagtgacgtcggcgaagcgtgcgggacctccgcccaactgacacgtggccgtaattcgctgacataatgcggacgtaatgcgagtctgggccctgccgctcacgcagccgacgatcgacgctcagcccgacagcgagcacgaagaagtagcaagagcagcaggaacagcaagagtgacgagaaggcagcagcaattaataaggggctgcgcatacagccctctctctgtccacaaggtacgagcgagtcgacggttgagctcattgggacgcctgcgcgcggtctgatcccggcacgcctccttcctcgccctcccacgctcgcctccctcctccagcttctctccgaggcccgtcccaacagtctgtctgccggcctgccaaccttgcaagtcaagatagcagcggcacgttctcgtccggctttctagcagctagtccatcagggcctcacagcccgccacccactgcgacgacacccactcctcagccctccctccctccttcaagatggcgacccctccgctggacgagcccccgtcgccaaagtcgacgtcggcgagccctcccggccgacatggctcgccctcgatccctatcccgtcaacgacgcagccgctcgcccatccgatccacgcctcgctcgctgtcgccgacggcgacgacggcagcaattgcggcagccacgccggccaggcgtcgccccgctcgcgaagcccggccttcaggccgctctcgagcgttcaggcgctgcttcgcgctggggggccgcagacggcccatctgagcctctcgggtccgccggcagggtcgtcggccgctgacgaaggaggtagcagcagcggcggtgggaacagccttcggcgaccggtcgacgtcgtcccgtccgatacgccccgggtcgccatgccccggcccggccagggctctcgccaggcctcgtcgtcgtccctccagccggcagctccgatcacaggaacgatgacgcccaacgccggcgtctcatcagcctcgttcgcccctccggcgccgccgccgttcgggagcgggctcgcaacctcgccccgctctctcgcacgcaggagggcgtcggccgtcccgctcagcagctccgcctcgcaaggcgacgacggccgcttgcccggcctcagaagcagcagcagtggcggtggcagggctcacgtccgtgcctcagcaggcaagcggccgagcacggcgaccggcgcagggccagtcgcgcctgtccagctcagcagcggcggcgccggaggggacttcagggcagggggtagccagtcgcaccagtcgtcgcccgtcactggttcgcgggcgaccttcctcgctagctatgcacccggcgacaacacagcgccagacggcggcgacggtaacggcagccgcagccgatccgtctcgccgtcggcagcgtcgccgccgccgaccggcctcccaccccgcctgctaagcacgggcgatctcggcgctcacttccgcgaaaacgaccccctcccgccggcgccgcctcctagccgcctcccgctccctttgcccgccgtcgcggccgacattgcgcgctcggctgccgcgcgcgaccttgagcgccggagccggcccgccgccgtcggcgacgacgggtttgatgggctcgggctcggccgagcggccgatacgagcccggacgacgagacggccgccaccgccgcggcgaatccgcaaggtggctacctgccgtcaatgccatcgccggacgtccaccctctcgcgctcgcccaacaacatcagcaagagcagctgcagtcggcacatccttcgacgcaggtcgcttcgcccgcttccttcgcggccaatattgacgctccggctggtagtaacgccgaccggcggccatcgatcacgacgggccatggaggtgtgtctatgcggttccagaggcaacgcatggccgatcgactaactgttctgcttttgactttcctgtccagctcgcaaccggccggcgtcgacgagcctgccgcccggccagagcccggcgttcgagttccggagctcgcgctcaaagacccgtaatgccgagggttgggactggaagaactttatcgaggcctactccgagggccgctgggacccgtttaaaattccaaacccgccgctccagacgccgtcgcctggcgcgagcagctcgacgtcgtcggcgtttgcgagctcgcgtgaggcatcaccggcggcctcctcgcagggccgcttctcgctacctcatggcgccgcgaggcctggctcgacctcggcaccatcctcgtcggctgcggtcgctccgcccaagcctggctcgccggcgctcagaccgtctgctctaatgtacggcggtggctacaccgggcaaggctcatactcgagcgggacgagcccgaccgccatcaccccgccgaccttgccgcctccgagcgcgagcgccccgctcggctcgcccgcggtgtcgtccggctcgcgcagcgcccggccgtctatgcgcaacgaagagtttgcaggcctcgtccggctcgccggcgccaactcgagcctctcgccgtttgtcctgccgtcgcccgagcacgagcacgtcgacccgctcagggactatgcgagcccctcgcgcgagtatccgccctcggtcctcggcgccagtgctggcggctctggcggcgggacgcgcaaaaccaagagcacgagcgggacggcgggcggtcgtgcgccgccttatggcgggacgtggacggcgacgagcaagggcatgctgccttcgatgacggcgtcggcgccgccaaccgctgccggtgctagcggcagtagcgggaccagcggcccaagtgtcccaccgccatcgcactctgcctcgagcgggaccgggctccgtcgaggactcgacgcgattccggcgacgccgtttggcgaggacgcgccgaacggtccctcaccagccgccgcccaaccgccgagtatcccgctcgcgacggccccgctcccggtgaccgagtcggggcaggccgctcgaaaggccgcggccggcgacgactactttggcgggccagcccagtggcaggctgccgcggcggctgcgaccgagcgtgaccgcctggcggccgacacgctccaggtcaccgacagcccgggcccccaaggcggcagcgaggatagcctgagcccaaacagcggtggcagcagcagcggcggcggcggtggcggagggcacgaggcgttcatctcgcgccggtcgtcgacgtggagcacgttgtctgacacgggctcggccgacagctcgcggaccgtcctcggccggcggacgtcgcacatcgacggcttctttgtaccgactgtctctgaaggcccaacgcggaccggctcgagctcgtcgtccttctcgaacgctccaacccagaccagttctggcagctcgtcccgccgcggctcggcaggcaagcccggcgccctccgcttctatccggagaatgtcctgccgaaggaggaggccgccaacgaggccttccgggccttcctctcgcagccgttcaccccggccgacttgaccgcaccctctccgccaccggccggccacgcccagcggccgccgctcggcccatcgaatcggtccgacggtggcatcccgccggcgcggatcccgctccagtcgacccagtctgacggcgtcactcggcgggcaagcggcggcggtggggccggcggcagtagcggcagcaacggcgtgcctaccggccctggtgcgcccaacggcccgaccgtcgtcccacgaacgagctcttaccaggagcagctctacctcgacaagggctggcttgcagccccaaagccgccggacgagattgagcgtcggcgggcgctccaccgcttcaacatcctccgctcgggccaggacgtcaactttgatcgcatctcgcacatggccaagctcgtcttcgcgacgcgcatggttctcatctcgatggtcgacgacaccgagcaatggtataagtcagagagtgcgtgcttcgcgacgctcgcctgaagcgaacgcgcaaagctgatcctctgacgtctctttcgctaggcggcctaaacgtcgacggcggctcgcgcgagccttcgctctgcgcgcacgtcatcctccagcagagccccgagccaatgatcgtcctcgacacgcatcaggattggcgcttccgcaacaacccgctcgtcaagggcaagcccaacatccgcttctacgctggcgcaccgctccgaacgcccgacggctacaacattgggtctctgttcgtctgcctgcctccctcggccgtcgtctctccgcctatgctgaccgctgcgctccttcctcagctgtgtctttgacgacaagccccggaccgagttcagcccacgccagcgacatgtcctcaaggagtttgccgccatctgcatgcgcgagctcgagctcttccgcgaccggctccacctgaaccggcgggcgatgatccaggactcgatggagcgcttcaccaaggaggtcgtcgagatggacacgacggccaacgtctcgctcaacgtcatctaccaggaggcggcgagcctcatccaaaagacgctcgacgtcgacggcgcccttatcctcgatctctcagcctttgagctcgtcgagacgaccgacgacgacggcaagacgagcttccgcttccaggccgaccagtacgtcgacatgggcggcgagaacggcaacagcgccggtggcagcaatccgaacgctgccgtcgatgacgagggcgacctcacgccagggaccgacagccggccggtccactttctctcgcgccaagactcggcccattcaatcccgacgctgcccgtgcttggcacggccgagtcgttgccggcgcccaagtcgcggaatcgaccgctgacggcgcccgagcaccagaagattgcagcctggctcaaagagtatccgaacggcaaaatctacgagcgcgtcgtgccggcctggatgaggcacatggtgccaccttcgatccagtacgcaatgtgctgcccaatctacaacattgaccacaatccgtttgctctcggtcagtccgcgtgcggctacgctttagaacagctctgtagctgaccttaagtgccctgcgtcctctcgcagtctttgcctacacctgcaacgtccagaagcagttcctcgagggatacgagctaaagtacctgcgcgccattggcctcatcatcctgagcgccgtcctcaagcggcggctgttgttagccgacaaggccaagtcgcagttcatctgtacgtcttctgcaggcgcccaaacagacgaccggcccaattactgatgctgcctcctatcttcgcttgctagccaacatctcgcacgagctgcgcacgcctctgcacggcatcttgctctcctcggaggtgagcctctgttcctcctcctccggagacgcaagtgcttggctgacccacccgctgcccccttccagttgatgtccgacaccaagctcgacgagcagcagtcgtcgtacttgcagactgtccaagcctgtggcatcagcctgatcgagacggtcaaccacgtcctcgactacaccaagctaagcggcaacaccggccgcgtctctggtgccgagtcgagcgaccgcggcatccagaagtctgaggtcgacctcgctcagttgatcgaagagacggtcgagggctgctggatgggccagcgcgctcgcgccctcatcggcgactcagagatcggcagcgtttacgccccgccgccgtccaccgtgctccgcgaggacggccagcttccgctcgaccggcagcaagtcgaatgcgtcgtcgacatcccctggcgagaggacggctggcgcttcaacctagaaaagggcggcgtccggcgcgtgctgatgaatcttgtgagcaacagtctcaagttttcgactgacggctatgtgctggtcacgctccgggcgttgccgtgctcggaagacgccggtgccgtcccgctcgaaatcgccgtcatcgacaccggcaagggcatttccaaagacttcctccagtcgcagctgtttcagccgttctcgcaggagaacccgttgcaaacgggcactggcctcggcctcgcgatcgtcaactcaattgtctcgtccgaggccgtccgcggcaaggtcgacgtctggtccacccagggcctcgggaccgagatcaaggtctcgctcgacgccgttccggcccgccggcgacacagcatcgacagcagcgcgagtgcagtcgacatcggtctcggcaccagcgtcacgttcctcggctttgacgagcgaatccgcggctacaagcttctgcgcgacgtgctcgagatgaaccttcgagactggggcttcgaggctcggccgtcgacggtccccggctggggcgacatcctcctcgtcaacgagagcgagagcgtcatcgaccactttaccgagcagggcaacgtcggccggccgatcgtcatcttctcgacttcgcgtagcgccgtcgagcagctccgcgcggtcaacgcctacgtgagtgacccaattatctgccttcggacctctgctaacccgatcctcttgctgctctccgacctctcagcgcgaggccggcggctttgcaacgctcgtcttcaagccggccgggccggtcaagattatggctgccatgcgggcctgcgtgcaggctatgaacggcacccgccggccgtccgaaggcagtcgacggtcgtccaacctttcgtcgacgagcgactcgcctcgcataccggcccgaacgccaagcgagctcgacataggctcgccctacagcgcgcacagcaacagatcctactcgctctcgctcgatgacgatcggacatacttttccggtctgccaggcgcgtcgtcgacctcgtcggcatctgcgagcggcacgcccagccatgtggcagcccatgcaggcttcaagcagcaggtcttgctccaacgacggcggtcagaggacgagcgcgaccaggccaagcgacgagcgaagcggccgtcgatgggcggccggtccatcaccttccagccagaccaagcgtcgccgctcgccttcaacggctactctggcgcggccaaccctcagcctctgaacgcacctcgcaagccctcgtccgagttcgagggcgggccgtcgacgccgagctcgcccgggtcgacgatctcaatcgttggaggcggcgtcctgctcaagagcgccgttgcgcccaactcggaggtggcggcgatccgcgaggccgtcgttaagtcgcagacaatccctaaggtactcgtctgcgaggacaatgtcatcaaccgccgcgtgctatccgcctttctgcgcaaaaaggtgccttccccgacgcccgtctcgctctctcgtcacctcgctgacagctcttcatcgtccagggcttctcctacatcgagacgtgcgacggccaggaaggcgtcgacatgttcgaagccaagggccagaactactttgacgtcatccttagtgcggccctgcgcagttcccttttgtttttgctgcccggcgctgactatccgccgtctctcgcccacagtggacgtgtcgatgccggtcctcgatggcctctctgcgacccgcgcgatcaggtcgatcgagtcggcccggcggtcggcccactcacgctcggcctcgttgccgacaacgcctgacccggctctgcgtgaccagctgctccagcgagccaagattcttgcgctgacgggcctcgcgacgcccgaggacaagaagaaggcgttcagcagcggcgtcgacggttacctcatcaagcccgtcagcctcaagacgctcgacgccgtctttaaaagtcagcctcctctttgctgggtctccttgacgcgttcgacgctgacctcgctctctcgcaacaggcttcggctacggactctgagccctcttgctcatctcctgcttctcgcacctgacaatcgagttccatcctccgctcggacttttgcactccgccttccttgcgccctcttccacgtcttgttccaccgcattcttctcttgtcatccatctcagcaagcttgtatatccatgtctgtatgcagccacaagagagggggcggtgctgggctactggaggagtcggcggccgaaatgagaggtacgcctgggctgttgagcgtctgctgcgcgagttagagaaagggacgtggtcagcactctacctggcacgtcgagtaagtcgaacgacacaccgaccttttgcgccgaggaccgagacaggcttggccgctaccgctcagaggagaagaggacggtccgaccgcatccatgttggcagctcgctgcaccgtcatgcgtcttgtgtaaggtctgtcaggaaggctgttcgagccggggcatcagcagtcggcggcgtctcagcgtcgcgaagcaggatcgactaatcaaatgccgaggaggtgctgacctcaggcgcggtgacccagtctttctgccacgcaagcccactgctgacttctaaggcaatccccttcgaccggaagacggacggagcattgccgacggaccggaagacgttgcccctgggcctgagtcggccgggcagcgtgaagaagtcgttgaagcgaacgatggccaaagacggcagaggcgagggatccgcctcgacagcgcgaacaaccgcgtctagtccctccattcgctgccacatctccatgacctggacgtttagaagaggccgtgcgaaagccgaggcgaggtcgataaactgcagcgagaggttttgaagacgcggcaatgaggcaaggaaattgtccgggacgcggaccgagtgaggttggccgtgatcactcgtcaagacgagcgtccggagattgacgaggcgatgcagcccagccgagatctcagtgagcagagtctcgttaatgttgaggagcttcagctcgcgcaagctcaacgcaaagacgtcccagctgtagtcgagaccgtagacgcagcgctcgcccgagaaggtgatcctcaggttctgcagagaccgcatgtcgaagattgtcgacagggcgacggcgcgggtcgacgtttgcagcttctctggaaggtgtctggccaaaatattgagcgacctcagctggagaggcacggccggaatgtcggctttgaacagccggcctgtgaagaagaagtgctcgaccctctccaggttcggcgtgaggtggcgatgacgcgagagcttggcgatgggtgcatccgtcccgtacaagagccggacgacacggacgtggcggccgagcgaaggagaggcttcgagtgctgaaggtggccaagttgctggaccgggcggaaagtgaacgagttcgaagagtgcctcttgaaccgtctcctgtagacaggatatgcgacgaggcacaagtggtcagctcgaacctccttggacgctcgcgctgcaggcgcaccctccaggcctgcgagacaaggcatagccccgacgcggagagctctcgcggccagaactcgcagtcctcatcctcgagaacaccgatggcctcctgaaggacgagcagctgaagctcgagcggcagcctcagaccggcatcctgacgaagagagagcgagggtggcggcgtgctcaaggtcagctcggcaggatcgcttctaaagggatttggcacgcacgacaccacttgagctgcgtgtatctgaaaggagccgcacgacgtcgttgtcggttatcatcttgaaatccgggtcggaagagtcttggagggcaaattgaccgtcaggaggcaggcaagcatcaagctcgaacggcaagtagacgcccgttggctgcgcagcacacgcccatacgcaggcggcgctcgccgctttcagcttacgaaaggagcagatcgttcagagagagagcagtcatctcatctccgagccttcttcgcaccgccctgctgcggcttgctgccggcctgcttgcccttcttggccaccggcttcttcttcttgtcctcttccgagctccaaccctcgtcctcatccgagctttcctcgccgtcgacgtggatctcctcgcccgaagcctcgtcgtccgagtcgagctcagcccgctcgccatccttgagctcgggcagagcgtcccagacctgctcgtcgtcttcctcgctgtcggcctcgtcgtcacctccgccctcgacgggcacggtcgccgggatcagggcctcgacgagcgtcgacgggaggtaggcgagcgaacggccgcttgcgccaaacgagcggccgatgagcgacccgcgctgcggcgtccgctttgggtcagcctcggacgccgggacgttgaaggccgagagcgtgtggtccgctccgagcgcaccgacgaggccctcgctcgcaaagagggctgaagctgtcgcacttgtctctgagtggaagtagaggacgcgaccggtccgcgcgtccatccggccgacacggccctggccgcggccgtcctcggcaaaccagacgtcagacgctgggctgtcgacctcgtcgccggcggcgagcgcgagcgagccgacgcccgtgttcgggaagggcttgaggacctcgtgaatctggactggccggcgcgatgcacgcgtgtcgtagagccggacctggcccgagtaggtgccggtgtacagctgcgtcgtcgagcctgaggttgccgctgccagcgacaagtggtgaattggcacgcgcagctggaggtagtcgttcgggacctgcggcaggcgagaaagagtatggtcagcgactgcaccttaagatgaacgcgcttcgtgcctcacgtttttggcccgccagacctcgccgtcaaggaggtcgaccgcattcttcttgcgcttgccacccgcgacggcctccttcttggccgctttggccgagtcggcagcaaaggcgcgctcggtgtcccagacgcttagatcgacctcgtggccggcgtaggcaaagcgctcgccctgagtgccgagtgccgagaggcacgttaggttggagggcagccgacgcttcttgagggacggagcggcggtcgaggatgaggaggatgaagagagggtgtgtagcgcaaggtggccggccgaagtcgcatgcaggagtcccctgcgatcagaagcgacatcatcagccagcgctcgagagcgaagcagctgcggcggatgtagacgcacgagggcaagaagtcgagcacaatcgttcggttggaggccttgaccgtcgagctcgtcgcccactcctgggcgatctcaagctctggccgctcaggcccctcggatgcagcctcgccttcaacagcgggcgcaggaggcgcaggtcgcggtgcttcaggcgacggcagggcgacaagcgtcaggcgcgaggaggagtgcgcgagggcaagctgcggggcgcggagcgggcgaagcggatgaccaccaggtcagcctcaacacctggagcgagatgactttcagagcagcagtgaatgcgtacgacgttgcgctcgtccgagtaggccaaacggtcgaccttgccccaggacctcgttgacggctcggcgccagcgcgagcccggacacgaacgtcgtgccccttggcctcgcgagcaagcgggaggacgtggacgtggtccgacgcaatcgacggggtgagcaggccagcaggcggcggaggtgcaggcggcatgcttgaggcgaggtctgaggagagtagagtcaagagtggcctgccggtcggtcgtcgtcgtcgtcgtcgtcgacaggcgcaggtcttgcctcggcggcggccgcgcgagctcggcaacggtcgaccgggcctcagcaacggcctgtcggcggccggctcaatcgatttcctttaccatacataggagaggaaacttcaggtacgaagcagactgcctgcaaaatcgtctgagcttttcctccgccaaaatcgatgcagaagagaggcagagcgagcgctgcaggaagcccgcaagctgagccggcctgcgcgcgcgcccgacctctcgaagacgctcgcgtccccacgggcttccctttcgtctcgaccatcactcgccctgacctcgtcgaccctgtagaactctttcagcgaccacctgcaccctctcagcttctgtccgcacgctactcgtcaagctcgccggaatgtcttcctcgacgagcacgcccgctcagcccgcctctggcggcggcgagtcgacgccggcccagtcgggccagtcgtcgacagccccgctccgggccatcatcaaggtacgtttcgctaggagctaccgaagtttgagcacacgcggcttctgaggctttgctgaccacgtgaaatcacccttcgccggtcttccagcactcggacatggacgaggagacgcagcaggacgtcgttgacctcgcgagcgaggcgctcgaaaagtacaatattgagaaggtgcgtcgtgagaaggtcgaggacgtccctcgccgaacttttatttacgtcagctctagcggctgtcgtgctggtcagagcacggcggctatgagctgccgggacgcggagagttgctgactgcggcgcgcccttatgcactcgaccggcaggacattgcgatgcacatcaagaaggaggccgaccggcgtttcggcacgacctggcactgcgtcgtcggcaagaagtgcatctggccggtcggaattgctgtcctcgttcgagccgtgctaaccatcactcttcgctcgggtccgtgcgcagcttcggatcgttcgtgacgcacgagacgcgatgtacgtcctcctcgactgatcaggttttgatcacacggcagattgctggccattcgattgcattatgaggcggtctcgctgcctccgcttgccgcgcttctttcttgcggcgtgcgctctgctgaccacaccctcttgaccttctgcccgcccgccacatgcctctcactcgataatcacctcgcaacatccagacttcatctacttctacctcggccagattgcgattctcctctggaagtcgtcgtagacgacagcgcgaccgcgcacggctcccggctaggctgaccgtcctcgagacgcaacacgcttcgacactcgggcgggacctcgggatgccgccaggcgtgcctatcctcgttctctctacagggttcgggatcggcaggcagctttcctctcgatccacgcgcccctccctttccgtcttcatccgcccttcgcaccttaccactcgcccagatgggccccgttcagccctcccttgtaccacttgctagccagcctcgtcgccaatttgcccacatccgcttcttacttcgctgtctcgccatcactctgctcctccatgcatcatgatcgactcatgggtccctccctctgtctgggccggactgaggtttcggactccgcctcgccttggcgcgcctcctcctttggcccggcttggggtcgtcttcgccccgccgccgtcccaagacgcccccgaccatacctcgaccctacccccgacgctatcagtcgacgtaatcagcccgctagcacgatgtctacctcggccagccagcagcagtcggtcgtctcgctcgcctcgcagccggcggccggctcgggctcggccctcccgatccaggaccagctgacgctcctccagttccggtacacggccgcgctcgagaagctcgtccacgccaacgaccaggtcgccaagctcgccgaggagaaggccaacctcattgccgagcggtccgacctccagatcagggtcaactcgctcctctcgggtggcgcgggccagatgcagcagcagcaccagcaacagcaggacggtagccagcaccaccaccacccgcagcagggcgatttccagctcgacccagccctcgcgctcccaggagcctacggcgtcgcaggaccgtcgtcgcagggtgcctacggcgctggcgggggcttcaacgtcggtggccaccagacaacacacggccaccggcagatcatctacgtcccgcagccccctcctggcccaacccagcagcagctcgaagccgcccggcagaagtacgacgtcaactggagcccattcgagggcttgacggaggaggacctgcggctgatccgtgaggcgacgccgaattgggacgtcaagaacctgacgcgcaaggtacgccgagtactttctgtacaagacgcgctagcgccagcacactctagctgacccacctctttcctgtgccatgccttctagtcaatctggtccgagctcacggatcggaacggcaatccagtcatgcgcaagcccttcccgaacgaggacgccaaggcgtactcggccgaaaagtcaaagtgccaggagtggcaccggatctttgtcctcgcgcgcgagacggttaagtcgctcctcgtccccgggacgacgtggaccgagcagaacgaggagatgcgcaactttgccgtccaggcaatcgagcagaaggtagaccaggtgtgagttggcctcaggcgtgtgcggttggtttcctcctgtgcccagcgctgaccctctcaatcctctcgccttctctctagccgctggtgtcaggaccactggaaggcccagatcctgctcgactcgcgcctggtagagtggaaccggtcgtggaaggacaaacaggccgtcctcgacggactcggctcgaaccggcgggccaagcggcgcaagctcgcaaaggacaagggcagcgatcagcatcacaaggacgacggctcgggcggcatgctcggccagggaggccacgacgaggacgacggcgagggcgagaacgacggcgagggcgaggacggccagggcgagggtgaagagggcgtcgagggcaacctcatgatgctcggcgagggcgacggcgccgacggccagcacgagggagacgaggagcttgaagtgtgagcccggtggcggcggtgcctgatgcgtgtctctcttatgcctttgatctcacgtcgacgttgagctgctcatcctgatagccgggagcaacttaggaaggacggattgatcatcagatgaagcggcgcacgacagggagagggtaggtgcgtgcaggaggtcaggcgcgccgcagcatgaggaggcgtgatgggtggtcgtaaagagatggcgcggaacagcgtgcgaagagggggtggctcgaggacggcggacggagagcggcgcagaaatggggccgatgggtgaagtgagccaatcagtccgagttgtagccgctgtgaaccgaaggggcggcgagccaaaactatgcggtcccgacgagcaagcgtcagtcagcgactctcggcagtctcggcctgaggatcgcagacttacgtcggaaaagcaaacatggaccttatcgacgaaccaaaaggcctggccccgccgccggacccacttaagctcaaagacgccgcccatgccgggcttgatctgctttgcggtgacgacggtgctctccatccagacgacgagtcgcttcgcgcccccgccggcggtcgacggcaggtaagcctcgtcggccaccgtgccgatcggctcagcaaagggcgcgggaaccggttcccagtactcgagtatgaccggcgcgagcgagtgagctgcgttgccgagtaggaagtggccgctgacgcccggcaggccggcagccgcgtcgccgaccggaccgatccgcatgatagcctcctgctcagctgcgacagcccactcggcgtcgcggacgccgccgccgaggatcggctcgaggaacgacattggctggcagatggtgtactcggagacgtcccactcgagctcccagccgggcttctgggtggccgcccagtcggaaatgggcatggagcgctcgtgatgcgtagccgggatttggccggccaccgggatcgggagggggatctgccactcgagcgcaggctcggcgtcgagcgtctgaacctctgaggcggaggcggccgacgtggcagcgtcgtgatcggtcaacgcaggcgtgtcgatgccagagcttgatgtcggccgggggggaagcatgtcgacggctgaggatgagccgtcggctgaaccatccgggtcgtcgaaagtgcgggagccttcgaatgaggcagtgtccgagtccgtcaggtcgaggttgtcgagctgggaggccgcggccgtcatgacgtcctcaggccagacatagccgttcgtctcgttggcctgctcgagccgagatggagcagtcaacgcatggtaaaggcagtcgtccgttggccagaggttaacgtaccttccggccccaaacgcgcgagcagacggtgttgaagccgtcctcaaaggccacaggtgtcgctgagtgagcgagctcttgtcagcctgggcgctcaagagcagatgccgacctctcgaagcccgactcaacctttggtaaggttcatctcctggcgggcttgctcgcaaatggcctgcacgccggcaaagtcgtcggcgaacgacggctccatcaggacgccgtgcgctctgacgtacttaacgaaggaccagacgacctgcggtccggcattgagctgggtgtcgtgcctgcaaatacacgagccacggtcgtcagcagtaggtccggaaagccagcgtagacgttgagactcgcaccagtggaggcctcggtcctgatagacgctgctgaggaacatacggacggtgccgaccatgtcgtcgaggaagcggctcggcaggtcgtcctcatcatcgaggccctcctcggggtggtacatgatctggccatcctcggggctgacgagactgggagtcagcctcagatcagctcacgtaggagacagctctgaagatgagacgtacaagccgtctgagcccgagtcgaaggcttcgtcgtcgtcctgcggcggcttctgctcgacaaccggccgcttgtccacctgcgcaaaggcgagaaactgcgcgcacagcgacggaggcatcagtcggcagtcgcagaagcggcacgaccgcggaaaggccgtacgttggcccagatctgcatgagcgtctgctcggcgttgatcacgtggacccgggagctggcgtactcgcgcgccgcgcgctggatgcgggtgagggcgggcgtcgtcctgcagcaccagacagcagggaagcagccagtcagctgcgagcatgggttggatggcgaccagtcaggctgctcattggaggactcacacatcatacggctccttgcctcgcgtctcgacaagctcgggcccgtcccagccgccggggccaaagaggtcttccgtccggacgatgcccttgcgcagcatctgcatccgcggcgcccgcggcttcttcctcttgcggcccggacggttcttgcgcttctccttgcggtcggcaaagtgctcgatgtcgaggtcgacggtcgggaagccggagctgccagcagagaggcaggaggtcagcgtgcgctcgcgttgtgagcgaacaaaaggacgagccggcagagaagtctggcagctcgacgcacccgtcgagaccggtcagcttggcgtcgctgtcctcttcgtctgagatgctgctgccctcggcctcaggcttgaacgtgcccgccggccagctctggttaacgaggccttgcgactcgaactgcacagaccgcgccgagacgcgtcgtcgagctcctgtcagctggctgccagagaaggtcttcctcatggtgtggcacccaacgcagacggtgtacctggtcgatccggagcatgcccggctgctttggccacggcggaaactgaaagtagtagagcttgcccgagtcgtcctcggcggggaccatgttgggcagaacgacctcgtcgtcgccgtcgccggcacctgccgccggatgagccgccgtcgagctcgacgatgcgtccgcctgcgaggcttgagcgggcgatgtgctgctgctgctcatgttggctgatgacgacaggctgctgagctgcttggggcggagggcacgggtgattgttctgggtcgttccgacgcgacggagctggccgcctcttgggccgacgccctccgagtcattgggccgagggccgtttggccattcgctcctctcgacatccatcttctctgctttgccctccaggatgcccgccagaagcaccgaaggcatcgaagcatgtcctccctgccctgttggactggagccgagctgaccagccctaacggccctgcagatcatcgagctcgagcaggtcctgtcgacgcgcgcagccgccgtctcgacaggcggtacgaccctgagcgacggccagctcagcagcgagccagccacccctgatccgcttgcagaggaaccgcatcctgacggcgggaagggatgggtgcgtctgctgcgaacttgtctcgaagcgggcccgctacgttgctgccgccgagcccgacgcatgctaacgcctgccctcctcttggcagaccattgcgtatgcgtcggcttccctcgcagccttctacacgggccatagtcagtcctgctcgccaaacgccgtgatgcagtccatctcgcttaccttctactatctcgcgcgcagattacgcttggggtgcgtcgttcgggccggttaccacgaagccgatgctgatcatcgctcgcgccctccgacggaaggaatcatccaggcccatcttgcaagggaaagcgttggtccgccgccgaccctcgctttcattggcgctttagcaatctcattgatgtcggcgtccttcgacttttggcccatccagctctcgactgactttgtcgctcccttccagggcgttcctcggcctggtgtcgacagttcttgtccgccgcttcggcgtccggccgatggccttcatcggtgtcagctccatcatttccttcttgttccaatttcaacaccgtctttacacgcgctgcgactgacatgccgctcgtgcttccctaggtcaccttcatggccctcggcgtcttctcctcaagctttgcgacgtcgagcgtcggcggcttgtttatgacttcgggcgtcctcatcggtgtcggcgaatcgatactgtttatggcgaccatatccgtcatctcccagtggttctacctccgtaggggtgtggccaacgggatcctttactcaggaggcgccgccggcggcgtcgtcctctccctctcgttcgagaagctcatccagaaggtcggcctgccatggactttccggatctacacggccgccatcgtcctcattggctaccccgcggcgtggctcctggtcgagcggcccgtccggcaggccaagtcgctggtcgacatgtgcgtttccgtttcttccctctattcgacctcatactgatcttttgcgacacctctcagcacgctcttccgcgaccaccgcttcctcctgctcttctttggcggtgccattggcgtcttccccctttttgttccccccttctttctcccgtcgtacgcgacgacaatcggcctatcgtcctcgcagggtgctggcctggtcgcggggtacaacgtcgcgagcttaattgggcggctcggcttcggcgcctcgtccgatcgccttggtccacttaacgtcctcatcctgacgctcatcgtcaacgccatctcgttcctcgcgatttggcccgtcagcaagaccgtcgtgcccctcgtcttctttgtcgttctcaatggcgccgctaacgtcggtctctgcgctcgtcctacttctgaactcgctgctgacactattgcgctcctgcagggcggtttctttaccgtcatgccgaccgtcgtcggctcgctcttcggcacggcccggcttggcgtcgcaatggcgatggtcgtctgggcgtggacactgccttacctgctcgtgcgtctgcaatcatcctccgatctggcaggtcagacggcttacactgctccgccttccatcagggttcacccatcgccggctacatcgtcgaagcctatggcggcaccgaggccggcttggcggcctaccttcctgttatgttctacgctggaggcctctctacggcgtcgctctgctgcatattaacaatccgcctcagcgccaacaagtcactgcgagtgaggctgtagagcaggagtaggcaagctttcccatggtctcgagagtacgcatctataggagacggtccagatcacatgacaggacgatctcagttacgtcgcatcttttcaagcgctacattcggagaaaggaccagagctaatgaagaggagcgtccaaggtgtaggagagcgagcaaggagagcgagcaagagaaggcgagggctgatgtgtgcgagggaagatggagtcgaaggttggcaagaggttgcttagaagagaaagctgaaggcaggggcagcggcggaggagatgccgtttgggcccgcaacgagcgaagaaacggcgtttggggcaaccgggagcgacgagacggcgttagccggtagcgacgagactgcgttcggggccggaatgatcgacaaggcagcgctaagcgcagaggcattggaggtagcgaaggcgtttggagcaggagcgaccgacgagatggcattcggagcggccgagagggaggaggcggcgttgggcacagcggggagcgacgagacggctgcgcaggcggccggtagaagcgtgggcataggaccagccgcgatcgagccgatgccgttgggagcggcctggatcgaggagaccgcgttgaggccaccgaccagggagaagatgccgttcggagcggccgggagggacgaaaccgcgttgggagcgccggccagggacgaagcagcttcagggactggcgcgatggaggagacgccgttgaaggccggaacgatggagccagcggcgtccgtggcgatgggagccaaggcggaagaccagaactcctccatgcagccggttgggacggcagcgaaggagctgatctcgttgacggacgccgttagagaaccagtcggggcgggcacgcctgtgataaagacggatagagtcagttccggtgacaacgagtgtcagatgcgctgatactcaccaatgaaggctgagctcccgtgaggactggccgggatggaggaggagattgtcgagttgacgttgtcgccaagcgccgggcttgggatcgcctggacgacggtcgtgacgacaccggcctggatgggcgcggcctgggcggccgaggcgaagagagcaaaggtaccgacggcacagatgatggagggcatgattgtaaggtaagggatggtgaatgaggtggtgcttcgagtaaggggagtggataaagagtcattcgagttagcccgccttgtcggcctacttttgaatggctcgagcgagcacgacaaactcgcgcaaaaggtgtcacccgcgacagatcaaaggtcagcgtgttgcacttgaagttagcgccgaccaactacccgtcggagatcgtccggggtgagtggccagggcgaccgaggcagtgacagcagccaatgaggtaaggaaaaaggggccgctcatctcgactgcggccgagccgcccctcacgttccagcaactcaagcgctcctagctgctgctgggccgtaagcaacctgggtcagggtcatctgtagagctatattatagcggcagattagcggaagggagtcgatatgggtccaaaatgtgagaaaagtagggagcgcgcgtctgagcgctgcgcgctcggcgtgacagaagacgcctcgggcatgcctcgggcgggccggccgtcggttcacacgcgatgggccctcgatccactttgtcctgagggtcgatgcagatgaaatggtgacagacataagcgggcatggtggcccgcacgcccgacttgcacgtcgacaggctgcatataccggcccggcccgagcatcctgtcacaccttgagccgatcgctcgtcgactcagaagaaggacgaaccgctgtcgaaccggatgttcagcgagctgcaggaaaaaatcagcatggcttcagatcagccccctgacttgcgaccctcgtcccccaggcgaagcgcctgccgtctgacgacagtgggcctctgcggtcacgcgtcctccttgccaaccttgccctcgcatttctctctctctcatccttttcgacgtccttcaaacgagcgaaagctgccccagtcgctcggccagctcgtcgtgccgtgggcctaggccgccgccgccgccgagggtggggctcgaaccggccgagcaaagcgacgacgacgggcgcgagacgtcggtcccgtcgagaaaaacgccgtcgccttggccttcgctgccttggaacggcaggtcgcggtatccgtcgtcgtcgatgcctggcgaggtatagaccgagcgcgctgccgggcgaacgcgcgagtcgctcggaggcgatgggtcggttgcggaccggaaggcgggcgagccggaagctgacggcaagcggagcggcgacgggctgagaaagctatcgagcggcgcttcggccgtgtcgaaggcaaaagctgcgtctgggccgctcgacaaaggtgaggcggcgtccgtgcctcccatcaaagtgagcatgccgtcaactgtacggatcgtgcgaggagcggggcgagcatgcgaaaccttcagcggggcctaggacatgcctgacgcgagaagaaccgggcagagacggtgtgagaagcactgcgcgggccaggaaagggagataagtggaagagtgagggaaggaggggacgtacgaccgccgccgtcgcctcgcccaagatcaggataatctgagccacgctcaaacgagctgatgcgctcgagcattgggaaggtgacggccactgaagggaggacgttataggtgtcagcgaaggcttcgcgtagatattcagagcaaccacggactcacgaccggcatcggcaccatcgggcaggccgaggtccagacgaggtgcgggctcgtcgcctagaagagcgcaaaaatggctttgacggtcagtcacccgtctcaaacgcaagaggagttaacgcgacgcaccttcttccccctctatctctctcagccgcgtcggtcccctcgggcgccgactggcagctccttcgcgcaggccgttgagcggcgccggcgagccggtcttgctcgaccaactcgccgtcgacacggccgtcgagcccgtccctccatcgctcgccgaccgtagtgcgacagagtcagccggatcgccgcctcgccctccttggagggccgaagagggcccatcctcggcgttgagcatcggtgagagcgagctcgggccgtcggcgagcgggagggcgtcgacggggaaggtcgagccgggcgcagcttcgtcgacactgccgcctccggaagagtcgagagtcggcccgtcgtcttcgtcggccgtaccaggcgagttgcgctcggagtcgagcagaggcgagagagacggtggtccatcctctggcgagctcgaccagtctgaccggagctcgaggccgtcgtcgtcgtcgacggcaccatcggcctcagggcggaggatgggcgagagcgagcttggaccgtcggccggaggaagtccggtgccctcggactcgttgaagagggctggcgggaggcgagcggagacgacgagggtcagcgactggtcaagagcgaaagggcagacgaggcgacggacgaacgttcaggcatcacaggcggctcagctcggcctggagggtcgatcagtcgatgagaaagttgaagaagcagggactggtctgttacgccggctctgaaggaagaggcggagcgcgctgctagacgaggggtcggtcggcggacggagcgacgagcgccgaggagcgtgcccgaggggcgagtcgagtggctgtcgggctgcgagaggaagaacgagctgcgagggagagatgtcgtctggccaaaggcgagagctggagggcagatggtggttaagaggcaagtagggcaaggccgtccgtaacgccccttggtcgtcggcgtcggccggaactcggccgcgcggagagccccttttctctgcaaccgccgccgccgagcggagtcgagcttcaagagggcagtcggcccggttgagcacgtagtagcgacctagctgagccagtcgggcagagaattgtgcttgttgagaatgaccagtcagttgacaagagacacggtcgacacctacagccaagccgggtcacaggctgagcaagtcccgcggtcctctctcgccactccgccgctccgccgccgccgctgtgtcgttgaagagccatcaagctctcatgccgtcgtcgactttggcgtctcgctctcggtcgtcgacgaggtcggcccagcgccccagcccctcccgccctcccacgtgccctccgcccagccgacccggcccatctcaaaccacgcgacgaccgcctcgcccaagcccctcttcccctgcacgcgctcctcgagcaccttctcggccgcagcacgccgcgtcgcgagctcagacgcctgccgcgcgcgccgttcgccggcccactcgagctcgcccgtctgagggttgcgcgccggcaggtcgcgcccgagcaggggcgaaaacgtcgacggctcctgtttcggcttcttagacgacgtatcggcggcggcggcggctgaggaggaggcgctgctgccggccgatgatgcggaagaggaggaaggctcggtcgagggatcttcgcctcgacctgctgcgagcgctgcgcgtcgtttgagcccggtctggtcggcgagggcggcgaggtagagatcccgttgaagcgtgttgccctctttgccgaatccagatttggcaaggaggtcctgtagacggggacaaggatcagacacccggtttggcaagggggcaagaggacctcgtttgcgcaccttctgctcgtcgacgcagccctgccaggtccgcttcaagccctcgcacgcccccccaaacatcgttgaccggtcgcacgcgtcgaacgccgctcggaggtctgagcaattgacgtttgcctggcggccgatgaactgcgcgccgggcgagagggcggcggcgcgcgagccgccgggcgtcagccggttgcgggccgacgagcgcgaggcttcttccgaggcctttgcgagctcggtctcggtcatctgccgggtcgtcactgctgggtcctcaggcgccgccgtcgaagaggaggaaagcgtggcggagttcagctcgggagtgacggcgactggccgccggctccctgcgggcagaggcggctggacgttgatctttggccggttgcctggctcgccggctgccgctgccggtgcgggctcgactggaacagtcggcgagaatgcaggtggggctgtaggactcgagcggtcgacggccgtcagcggctggtaggcctcgagcgagtaggggttgacggccggcgccgaggcgggtccgcgtgcggcagcggccggtgctgtgggcgctggagctagtgttggtgctgctgccggaactgctggtgctggtgctgacgctgctggttctggcgtgctgctactgctgaaaggccacatgccgttgtgaggtcgagtcgatggctgtcgctcggacagggcagcctgtcgacgactcgaggcggagtcgtgctggccggcgggctgagtgacgaaaattaaaaaaaggctcgccgggacgtctctttgcctcttcgcctctccgtcctgctctctctcacctgcacccttcgatacccttctgcttcttcatccgtctgcacagcatataccccgtctcattttgcaaaaaaagggcatcatcgttcagctcgcacacgtctccgacctctctctctctcgcttctccttccgcctcgctagcaacagcatggccccgcccgcccggtcgcccgttccggcctcgtcgtcgatcgtcagccactctcacccgcaccacggccaccaccaccacgccggaggaggccaggtcggccacccggcagccgtcgcagctgcggccgccgcgcagggcttcgctgcggttgaaccggaggacgacgatggcaagggcgagctgctcaagggcttgctcgacgtctggtggtccgacgacgaggtgcgtctcttctccccactgctcgcataacactccttctttttcattacctcgtcgacggcggtgcgagattggacttagagcgccatgtggggcgggcgtcgaagttgactgaggcgctggggaggcgcgcagaggcgatggctccttgccaacagtcaagcaggcgtcttcgccgctccttcgactgcctcagctcttctcttcgagagctcgcttttcaacagaaagcgctcgctctcggcccatccggtcttttccaacgtgcgaagaagagagccgagccgtttgctcgcttgactgaccacctttcttctccctttcgccgccggccgctctccttactcgtcgccttcaacctgcgcccgctcaaataggaggaggatccagaatgtccgctctgcatggaggagatggacctttcagacgtcaacttcaagccttgtccgtgtggctatcaggtgcgtcgtcgtcgtcgtctctgagcctccggcctggggccaggtctccatcgcgcgccgctgaccagccgacctctttcgctggcgccagatctgccgtttctgccaccaccacatcattgcaaacctcaacaagcggtgcccggcctgccggcgcgtttataccgaagaggacgcagagtttatcccggtcgcgcctgaagagtcagtcgccctttccttgctcagggagaggcctgcggcgctgaacgtcaagccgctcttcctcccgcttctgccagaatcaagcgcctgacgctcgctaagaagaacaagcagaaggtcaaccgcgagctcgaggccctcggccggcgcgggctcaaagacgtccgcgtcatcgtgaaaggctgcgtctacgtcaccggcatggcggtcggccaggagggtcgagctgaggaggtgcgtcgcgcccgtctgtctttcgtccagcgttcagtcggctgacctgcctcttgtgcctccgcgcgtgcagcaactggcaacgctccggtccaacgactattttggccagtacggcaagatctccaagcttgtccttcacaagcgcccggcgtcgtcgtcggctgcggcggacggcacggcgcctgcagcagcggtcggcatctacatcacctaccttcggcgcgaggacgccgcgcgtgctatcgccgcgctcgacggcttcccctcgccctctgtccctggaacggttctccgcgcgagcttcgggacggccaaatactgcgagagctggctgcgtaacgtccggtgcgagctcggccaggcttgcatgggcctgcacgagtggggcgacgagcgcgatgtgttccggcgcgaggacctgacgacgctcaacgttgggatccggaagccgacggtgccggtgtcgggcggcggcggtgctggagcggcggttgggggggctgctggaggtggctcgtctggcggcaagctaggcaagggtaaggcggagattgactgtgcgtgtcgtgtctttggctctcggcggtcttcgcttgctgaccttttccccccaacagccaacaccgccctcccacgcacagcctcttgggcatcccgtcccggggcctcgtcatcgaccgcccagccctcaggcctcgcctcgcttccgccaaacccaacgctcgctcaggcccaggcgactccacccgttcctcgctcgctaggcgccgaccggccactctcgagtactgccaagacgcgcatccccggccagctcggcgcgcttgctagtgcatccgagccgaggatggtcactgtcaagctgacgagcacggtcaaggcggccgctggaaaggagaaggaccggcccgcgccggttgtcgtctcgctgtcatcgacggtgagcgataaggctggctcaagcgatctctcgccgatgccgccacctggtctcgtccagctcgtcaaggagaaggaccgcagcggcaaagagacggcatcgtcggcctcgagctccaggccagcgacaccggcccttgcagccaaggagcctcaagccgagctgcccgcgccaacgccaacgaagcgcgagctccagcgcgagcgtgaacgcgagcgggaagcggcggccgctgctgctcgggttcagcgaacgacatcgactcgcacgccgacgcctccttcggccgccgagacgccttcgccgcctgctgccgtccagccgcagcaggcgccgatcgttggcaccgctcctccgccgggcttgtcactccctccgacacgtgtgtcgacccctcagccgccagctccagcgacggccgaggacgagccctatcacccgtcgacggcgactcaggccttgctttccgatgtcacgaaccagcgccggtcgccctcgccccctcctgtcggtcagtgtcctgctacgttcgggcgcctaacattcgacggaagcggcctgcccgactttggccggatgctgtcgttcgacgacggctttgccttccagcttcgcgtcgacgacaagcgctcgcggggttcgagccagcagccctcggcggctggtcagcagccttacgacgccgccctgccgccgcacctccagccggctgcgactgccggtgccggctcgggcatcttctcgcctttcggctttggtctgccatccgccctcggtggcatcctcggcgctccggcggccgccggtccttacgtcggctcgtttgaccctttcggcgacagcccggctttcggaggtggcttgggcgccaacgggcaagagaacgacgatccgtcgggctcgcgccgatcgcgctttgactttgcccgccgcaactcggccaagcagccgaccgacctgccgcgatccggctttggcggcccgtcgcttccggccttcggcggcggcggcggtgccgacccgcttgcgagctctcgccgcggtagccaggacttgccgtttggcaacggtttcgcgtggaacgtcctcaacgacggctcgggcggcactggcggtcatgcttcgggtgcgacgagtccggggcctggcaggcagcagcagcagcagcacatgcagcacccgccacctccgggcttgtcgccgctcccttcggccgcatcgctccagtcgcaacgtcagcagcagcagcagcagcttcagggaggtaactcgtacgccgggggtccgccaccgagcctcaagcttcagcaccagcagcagcaacaacaacaccagttcgcgccgctccatcagcaacagcagcagcacaacggcgccaacagctgggctcagcagccgattcctcgaccgggaagtacgacgggcggcaacatcggtggcgccggccagcagggtatgggtcaggagcgcatggcctttgcgcgccagcatcagggccagcaaggccagacgcccatgcagcagcagcagagccagagccagacgctcaaggagatgctcggcgtcggctcggcggccggctttggcggctacggcaacggagcctctagcagcggcggcggtgcgtcttcttgcccgtctgcgcgggtgatcgctttccattgacttttgccccgcttccacagactacggcttccaagacccagccatcatgtcgatgcggacatccaaccagcagcgtcagcagcagcagcagcagcatcaggctttcggctcgtcgaacggcccgcactcgccctttggcggcccgcccggctacggcggtgccgacctgtccggccttgacacgcagcagcagcagcagcagcagggcctctcggccttttcgccctttggcggtcagcaggacggcggccgcaatggccggctcatgcagcagagctatttcggcggcggaaggacgccctcgccggccaaccttggctcgcttgcatctggtaggcattccgatcacctgcgcgggggtgtgctttagtcttctctcacccacccaccgcatccccctttacgctcctctctccatcgcatcgcaacccgcctctcgcccaccctcccacttagcgctccccgcaaccccatctcgcacatgacaccttaacgacctttgtctaccgaggaggggatccgcgcgtccgactccccgggtcgactggtgtgccgtttacccttcttctccctcccatatcaggctgtctgagatgcatccagaccaaggacatgaactaccagggctcgacgtgcatctgccgcgtgccaaagtccaagctcaaagagggccagacgattcagtgcggtgcgtgtcgcctgtcgttgttgcggatcccagggtgccgcttcttcgacgctgactgggctttctcacccttctgtctctcgacgcagtccactgcggctgcaagggctgcagcagtgactcataggcgtgacgaacttctctgcatgtaaccttctcaagacaacgactgtctcccagcccgtggccggcattcagcgcgcgccaccgtctcaagggaaggagcacaacatccagagcttggcatgccaaagaaagaggaggaggagaatgaggaggatgccgagccttttcagtttggcagccgaccaaagtctgcgatgccgctctcgacccactccttcttgacgagcctttcgcgctcctcgacgagcaccttgtagcggccgcggatcgtgctctcggtcgtgtcgacgactgcgcagacctcctttgcgctcttaccgacgccccagaggtggctcgcaaagtagaggagcgagccgacgacggtgagagggctccggccgtcgatcaggccgagcgccttgccggcaatcaatatgtggaggcacgcgctctggaagcccggcgtctggctcaagccgaggttcgagatgaagcgcggcagcatctgcgagatgacacgcgtctcggacgagttttccgcgtgcgcgagcgcctcggccgacaagggggcggcggggtcgcgtgcggccgaggggggaggcgtcggtgcgctcggcggcgtcgcagccggtgcgccggacgtgtcgaccgagcctccgccagaggccttgacctcaaacgcccgctcgagcgccttgtagcactggccgaggagcttctttgggacctgggtcaggacgcaaatctccttgaacgtccggggcgagttgcccatccggcaggcgatgaagatgcaggccgcaatgacggcctcctgcggcttgcccttgaggacgccctcctcggacgcccgcttaaacagctgcttggccgtgtcggtgatgcccttaccgagcgaaatcttttccgttagcgcgccaatgtcggtgtaggcggtcgacagcgtcttttcgctctttgtcgacgctttgaaggccgcccgctggagctcgcgcgagaggcccgtgttgccgtcgcggaacgagatgcccgtctcaaacgtctcaggcccgtcgagcgggttcgaggccgaaccaacacgcgacgggtcgtcgccctcgtcgttggcgaacgtctgaaacgcccggaggtcgggacgatcgtctggtcagcctcctccagctgacagaactccctccctctcctcggcgacgcacccgccactcggaccgcgtgtcgacgatccggtcgccgaggacgagcccgcacccgccgcagacgaggtcacccgagccaaattcctcgatgatctctggcttgcggggcgcgcactcagggcactggagccggaccgagaggtcgggaccgatgatctgacgagccgaccgcgggcgtcaggggtcagccttcgaacgagacctgggcagagaagggccgatcgcgctgagcgagagaggagagggcgaaccggcggcggggccgacttgggtccggcctggagggccgtgttgcgcgccgggaagggctgcataaacgacatcgtacgattgcgagacgaggcgctgacgctcaaggcgagccccttggagaaggagaggttcgacgcgcaacgcagctaagcgggcgacaagatgggcgggcggtctagcggcttgaattccagcggtcggacggcggaacaacgtcagtcaggggaaaggtcgggcgtggcgagcgggaaagggagcatgtggagagacatggcagggtgtggcgagagtggcggcccggtgcggtcctgctgaccgaccgaccggacgccctccttaaccgcaccctctgctcgacccgaccgcccatccgccttctcctccagcaccatccctctcccagcccgctcctttgagggacgggcccactcgactcccggcgtgcaagccgcacccccctttgagccgcccgccacccacccgcccggttcgacgaagccgtctgaccccgggtggaaaaggtgacgaatgcctctgagcgggaggtttgggaagcactcacactcgagtagaggagggtgtgtcggctctagcgaaagagcggcagcggtgggtggacgacgggcgggaaggaggataggagaggaggctgctgagtcggatgggattagagcgatgcaggctggcagaaccaatgcgcaagtacagggcagggctccggcctgacgcgcgccgctcgttgcctccctctgcttccctcgacagacggacgaccgtacagccaagccagccagccgccatgcgcccgcccttctagccagtccatagtctcaagcaagggatggagctggccgcagccgaactgctgccgcccggctcgctcggcgtcctccagctcgcccgcctccagctgaggctgatcaacgagctcgagcctatcggctgcgcatcctgcggcgcgctcgacctccagtcgacgagcaacggcgggccatccaagcgtcaaaagacgacgaggcggtccagcagccggacgcacaagggtgctaaacccgcggcggccacgtgtgctgtctgcgctgaatcgcccttggcgcgcattcacccctcctcgtccactgcgccgtcaccgccgaaccgccctcggacgcgccgctccagcgcagccgacacccaggctcctcctgctcctctcgtcgctcccgagcctccgctcgagccgtcgtctcctccgcgcaagccgcccatcctcgccgccgcctccgcagcgggctcgaccccctcggccctcctttccccaacactcgtccacgtcccgctctccgagcccgagacgccctcggtcgctccgccccctcctccgccagctccagcacagacgacctcccagggcggcacaaagcgcaagggccgtggcaggacgctgcgcagagggaagggatcgccgcttgagaaggtgctggcggtcggagggcaggccgtagagggcgaggtgcgggcggcggcagtgtccggcgcgaggcattcgacacggctcgatcggtagcatgtgcgttcggcccggcgggcactctctaacgctacctcgaactgacgcgccctgcgccgcagagactaggagatctcctgcattttgtcggccccctcgtcgagccctccaccagcgggcccagcatgcgacttcgccccgcctatccaacagcgtcaagccccctcatatctttcggggtcatcccacgccgggcaggtcgcgcatcgcgcgtcgagcgaccgacgcatcgcgctcagcgccgagaacgggcgctctgctctgttaagccccccagccgtaatcctcgcgcatctgcgctcttcctgcatcagcgcgctcctctttgtccttacctgctcagcatgagatttgtttcctgtgacgatcaacgtgcacgaatcgcatgagcgacgactcacccactcgccgacaggtggccgcacgcgcagcgcgacgaaatcttgagacgcaccgggcgcgccttgctctcttccgatcgacctcctccttcttccccctctcttcgcccacgctagcagccctcatgtccggcgccgttcccatcgccgttcccggctcgtcctcgcacccgcgcggcgcccttgccccccaagccggcgcttccagcggctcgaagggcaaaggccgagctcccgccgctccttccgcccccgctgacggctctgccgagcgcaagccaaagaaattccggcaccgcaagaccaaggaggaggtcgagtttgagaaggagggcaagcggcttgcggcgggcggcgatggtggggtcggcgtcaacaagctcaaggcggcgctgaggcaggcacggaggctcgtcgcgaaggtgcgtcgacgctcttttggctgggcggccttggctggctgccaggctttcgagcgacgagatcctgtcctgagcagcatctgacagcccgcttcgacccctacgtccgctcgttcaggagggcctccccgctgacgtcaagaccgagactgagcgcaagatcaagggcctcgagctcgacctcgagcgcgcgctcggccgcaacgaggagaagaagaatgcaacaaagtaccacatggtgcggccccactgagtgtctgttggctcggccagcagtgtgctgatgccgttcttgatcgctacgtcctgggtcaggtcaagttctttggtgcggcctgctcccgctccatccaagtctgtcgcgtccgaccgtctgctgaccttgcgctgcgctgtgcttctccctccttcgtctgcagagcgccagaagctgctccgccggcttcggcccctgctcaagacgctcactagcgagccaccgtcgtccaagaagcagcttgccaagctgcagagggaggtcgagggcctgcgcgtcgggctcaactacgtcctcgtgcgtcgcatttccctcgtcggacggaaggaggcccagaggagctgacacgcggcgctctactgccatgaactcgccgcctcagaactaccccaacacgctcaagtacatttcgctcttcccgccaaaggccggcggcggcgggtctgacgtcgaggacgtcgagtcggatgacgaagagggcgcgcgcaaaaagccggcgccgctgctcgacgtcccaaaggagggcgcgggcaagagcgacctgaagcgaagcgagctcgtcgagaaggtccggacgatgatggccgctggcgagtgcgtccgcgtctcggccgaaggtctgagcgatcacccggccgtcttgctgacctgtcgaccccctttccggccagactctctgccaagcccgaggaggaaatcctcgccggcgagggcggcgacgacgccggacggaagcgcaagcggatcgcggtcgacgacggcaagccgggcaagaagggcaaggctgcggccgagccgagcgcgatcgctgaggacgacttctttggggccgggagtgacagcgagtgacggcggtcggacgagtgatgcgcatgaccctatgtgatttgaccatactgagagaggtccgttcagggaaagggtcgccgtgcgcaagcgaagtgctcagtgagtgacgtctcctatcgccgacgcgaaggccggcggctcgctcctgagcagcacgaccctccgaatcatcactcgcccctcacgaccagccttgcatcgctgccttcattccttgtgagacctttgcctgacagacctcctggcagcgcgtaaacgcctctcatggtgcgcgtcctcttgcagctcgcttgaccttgaccttgatcgagctgacagcattgcaccggtcgaccctcgcccgatgcaccggctgcccgagcagaataagcacccgcccgtgcccttcaagaagacggtcccgctccgggccgagctcacaaagtcgctcacgcgctacatcgccgacaacttcaaagaggtctcggtcgaggcgtttaagaacgatgtcgctcggctcgcgggtctgcgcgaggccgccgtcgaggctggcgtcgacgtccaccgcgagtcggtcggcaagctcgtcaggtacgttggtccgggcaggcaaggcatagctcagctggagagctgatttgcttcgttgcctctctagctacaacgcaacgctgagctacctgctcagcaagctcccgccggatgtaagctcaatcgcgaggcaccaccaccttcgacctcggctgcggtcactgaagctgaccctcttcactccgccatctgcagatcggccagacttttccttaccttccggcgtttcctccggcctactcctttgccgagccggcggccgttccgctcccgacgctggcgcacgagcgggcggccgtactctacaacctcgccgcgctctacgcaaacctcgtgcgcccgcttcgtgctcatccgcttcagcgagtgccgccaagtctagctaacacggccgcctcttgtctcggacagggtgctgaggagccgcggacgacgaccgactcgctcaagcgcgccatcgcagccttccaggtgcggctcggccatcgccgtctgccgagctgtcgacccaactaaccaacccaactcggcctcgtcccctttcctccacacagcacgcagcaggtgtcttccagtacctgctcaccctcgtgccttcactcccttcgctcgccaacctcggtaacacagtctatgatctcaaggagggctacctcgagacgatgaaggtcctaatgtcggcgatggcccaagagtgcttctggcagcaggccgtgcttggtcagtcgttcggcttcggcttaaggacccctcgcttgggactacgattgatcgagcttgggcttcggagcagaacagtacaagaacggcatcatctcgcggcttgcgatgaaggtctctgagctgtacgacgaggcactgacggcatcggcaaaggacgtcccgccgacgtcggcctacctgccaccggtccgtcacgtcgcacactggcgagacctgtgccttccgagctcaccttctgccctttgctcgaccacagctctggactgctctgatgaacatcaagaagcatcactttgctgccgcctcgcaatgtgcgtcctctctaccaagcgctgactatccctacaggccgctgacctcagtctgcttgtagatcgcatgtcggtcgaggacctcgagaagaatcggtatggattcgagatcgcccggctcgatgttgcacaagcgtcggccaaaaaggccctgtcctttgcgaaggccgggatcgtcaccgacgccgtcatcgcagacatcaaggtgcgttgggggctgaggaggagcctcgtcgacttccttcgttgtctgacgtgagcgtgtcgggcccaaacagggactctccgcgacggttgcctcctccctcgccagggcaaagcgggacaacgacctcatctacctcgagcacgtcccgccgcctgcggagctcgcctcgatccaaggagcgctgatggtcaagactgtcgtcccgccggaggttgacgacagcctcggctggctgatgaaggagggcggtggactcggctgggacggcctcgtcgactatggcgtccacctcgctatcagtctgtccccttccctttttcaaactgccgaccagcgaccctgagctgatctctgactcgtgctctgcaggtgtctacgacgaccggaaggacagctttgtccgggacgagatctctgccggcaaggctgagacggaccagctcgcgaccacgtgagtgcgactaaggccgccgtcgagctgtccttttcggtcatgtcgccgacacctttctcgcatgcaacagtacgcttcaatcgctcaatcttccgggagccttgcaggcggtagagcggccgctcggccttccgccgtcgctgctcggcatcgcccaggacatccggcgtgagcgcggggccgagcgcgtgcgcaagctgctcgactcgatcgccacgctccgctcgcgaaccgacgccagcctgaacgaggtgctcgatcatctcgatcaagaggccgaggaggacgagacaattcgcgcgcggcactctgcagcgcagtggcgccgcccgctctcgcacgaggtcaacggccagctgatcgagcaggtcgagctttaccgcaagacgctccaagccgcgggcgagagcgacgcgatcgtccggcaaaagtgggacatgtgggaagagaagatcgagatcctcggcggcgacgaggtgcgtgatttgccttctcgctccaacagtacagtgcacgccgctcggctcgcgcgctgacgatgtcgacgttcggcgatctcctaggagtatctcaacggctcgataccgcgtctgccatctgggccgtccctgacggccacaccctcggctcgcgccctgcacgcctcgctcgagaagctcgccgacctggccgtggctcgatcgcgcatcctcgactcggcacgcgccatggcggcacgagatgacgtgcgagctcaggtgctcggcgaggccaactcgatccaacgctcggcaggcacgtcgggcgaggtccgggtcgagtggttcgagagcctcttcgagaaggagctgcggaagtacgccaacttcaagatcgagctccaggccaacgtgcgcgagacggaggccgcgctcgaagatatccgagtacgtcctcagccccgtcctgcctcttgaggcgcagatgctgataaggttgcgctctgcaggtccaaaacgaggactttcttaactcgcgccggacatcgcccatcatcaagtcgcgcgagaaggcgctccagagctacgacgtggcctttcaaaagtaccgcgaggtcatccggaacctcgaggaggggacgaaagtgcgctgcgcctcctccttcgcagccgatacttcgaccgttcagactgacgcccgctccctctgatctcgccagttctacaataatctgcagagtcacctggctaagctgtctgatgacgcaaagcaatgggtctgggcccgacggtccgacctgacgtccctctcaaacgcgctcaacaatgctcacctcgccgctcagcaggccccgccatcgcgagcgccttctcagccctcgcggccgccagccgattcatttcagctgccgcatccgagctcgggccagtggtcgagccagctgccgccgccgccacctggccaatcggcatcatcgccgatgccttacgccaaggcccgcgggcccgcgtcggaggccgcgagcgacgtaacgatcaccgcgagcccgcgccggagcgaccgccagcgcaagggaggtggagtcgtttgatgcgggacgagcgatcttgatgactctccttcgcgatcatgacggcctggtactgttggtgacggcgtgcaagcaagcaagcaagcgtgtacccgctagcatgggccggctcgttgcacgcacgcaaggttgttttggcccgggcggcgcggcctccttccctcctcagccgagagtgtgctcggcttccctccctcttccatccatccagcacgcatctttccaaagcctttctcccggggtttctcgtcagagccaagccatctggacagcgaccgacacctgtgcccgaccgacgaccgactcccagcttcctccatccgcgcgacacctctagcctcgacaggctccccctccgacctccccgaagccgacgcgcttgtccgagctcgtccgagacctccatcgtcagcggcctcctcgccctcccttcccctaattgactttcaggagcagtctcgcgcttggcatggcatcagcttcctatggcggctcgagcggctcccgcaacgtctcgagcagctccggcaggtcgcccggcgcgagcggctcgcgcaacacgatgaaccggtactccgtcagcgccgtgcgtgaattctgtcgctcgagggtggatagtcgcgtcgccaagcgctgaaatccgcccctgctgcttccagatgtattcgatggcggccgaggtcgacatggaggtcgaggacgacctggcccgaggtcagtcgagctcgaacacgcgtcctgccagctgccagagacgagggccatccatctgaccatcgcgtcgctcgcctctgatcggcagcccagaagcggctgcgagacctcaaaagcaagatctcctcgcagagcaagaagaactttgttctcgagcgcgacgtccgatatctcgactcgcggatcgcgcttctcatccagaatcgcatggcagccgatgagcagcagcaggtggcggagcatcttgacgaggaggtcgctccggacggcgtctacctcgatgacaagaagatggcggcctacggcaacctcttttttctcttgcaggctgagccgcggcacattgcctcgctctgccggctcatctcgatggccgagatcgacatcctgctccagacggtcatgttcacgctctacggcaaccagtacgagggtcgcgaggaacatcttcttctgaccatgttccaggtccgtcccaaggaaaatcgcattctgctttggcgtcgatggctgaccttctgcgcacgcgcatggcagtcggttctctcggcccagttcgagacggcgaccgagttcggctcgctcctccgcgccaacacgcccgtttcacgaatgatgacgacctacactcggcgagggcctggacagagctacatcaagggcgtcctgtcggagcgcatcaacagcctgatcgagcacaaggatcttaacctcgagatcaacccgctcaaggtgcggcttttcgactcgtcacgagtcgctcgtcgctgacagcgaatcatgctccccaggtctacgagcagatgatcaaccagattgaggaggaccgcggcgagctgcccgagcatctgcctcgcggcgtctctgccgagattgctgccgccaacgaggacgtccagggcatcatccagccccggctcgtcatgctcatggagatcgccgacagctttctcctgacgatcatcgacagcatggagacagtgccgtatggcatccgctggatctgcaagcagatcaagagcctgacacgcgtatgtcgcttttgcacctggctgggtcgagagccgctgtcgaaccggccgctgacacttttgtcccttcttgactgcctggctgcagcgcaagtacccggacgcgagcgatttcgccatctgctcgctcatcggcggcttcttcttcctccgcttcatcaacccagccgtcgtcacaccccaggcgtacatgctcgtcgacggcgtcccggccaagcacccgcggcggacgctcacgctcatcgcaaagatgctccagaacctcgccaacaagccgtcgtacgccaaggaggcctacatgatgtctctcaacccctttgtcgacaagaacaaggcccggatcaaccagtttctcaacgacctatgcgacgtcggcgacttttacgagaatctcgaggtgaacggcgctcctcctgccacgccccaggccgtcccactgacttctctctcactctctcccaccagctcgatcagtaccttgcgctctccaagaaggatctccggatcaacatcacgctcaacgagctctacgtcacccaggactacctccagaagcacatcgacatcctcgctccgagcgacaaagcgcacctgcggctgtgcctggccgagctgggcccagctccgggccaggtcccccggaaggagaaccgggcgatcgacctgccactcttcagccggtgggagacgccggtccaggacattgcgacccagctcatgtcggacagtaacgtcaccaaaaacgacatcctctttcaggagacaaagtcgatctttgtccagctgctgcgttcgcttccgcagctggccgagcgccgaccgatcaatctcgcccatctcgccgagaaggcagcgacggccaaggatgcccagctcgtgcgcaagggcatcaaggtcaaagagatgttgcgcgaactcgaggagctcggcgtcctcgacagccgcgacaaccaccggctcatgcaggaggaggtctcggccgagctcgtccatctcggcaacatgcgcgagaaggtcctcgccgagactgactcgctcgactcggtctacaagacgatcggcgaccacaacgcgtgcgtgctagcctacgcgaggctgttctcagcgcaagccgcaagctgacgcttttccttcccccgggtgatactagctacctccgctcacagctcgagcagtacaagtcgtatctgcagaatgttcgtggcgccagcgcgaaggagaagggtcagatccccgtcggtgtgacggccgtcggtggcaaggagaagaagcaggccaaggcacagctcctcgggccgtatcgcttcacgcacgcccagtttgagaaggaaggcatcatccttgagagcaatgtcccggagaaccggtgagtggacgcgcccagggtcgaacataatcaggctgcgagcggctgacgcccctattgaactctgccagccgcgccaacatctacttcaacatcctttcgccctcgccgggtaccttcatcatcggcctgcattacaagggccgcgacaaggccattctcgagatggatctcggcctcgacgatttactcgagaaggtccgtccctcagactggattggggtgacgactcgcttgagcttacgccccctttttttcgcgcgtccaatagcaaaaggacaacaatgacgtgctcgaccttgagtacgtccagctcaacgtacccaaggtcctcgccctcctcaacaaggtgtttgtcaagcgcaagtaaggcgccggcgccgatggcggccggcccacgcttgcgcacagacgcccttcgagatgtccgcgcccgctccaaccttcacgacccacgacctctgatgtagcagtctttttgtaaaactcacgccgagctatcggccgctggcctaccgcgctgggcgtgtgcctcctctcctcgcgtcctcccattctcgatcctaccctggcctcgtgcctttattgaccctcccgacacggccttctcgccgttatgaacttactccaccttagcctacaaaccccctctccccctaatgctcatgccttcgtcccgaaagttgggcgtgcgtgcatgacgtacgtcgtcggcgcgcgcgtttcactcgagcccctttggccaagccagccgggccagcatcgaccttgcgtcttccttgccggccctcatcgaccctccggacaactctatttttcctcaccctcgcctgccctttcctctcacctcagcaacgccacgtccgtccggcgacagctaccgtagcccgcactcggccccagctgctctgttctcggtcgcccgctcgcagctcagccctccagcgctcgccagctcagagtgagcctccatcgccctgactcttggccagctccgtctgacgtagctgacatagtcgcttgaccaaagcctgctatggcgacagctctgccgcctcgcctactgtcgcgcctggcgctaccttgctggactaggccgcttctcagctgtgcgagctcgcgcctcgcgccacctaagccggtggcaccccgcgcgtttgcgacgaccgccaccctcgctcgacccttagacaatagcgcggcaaaggctcagctcagcgctcgcggcgtcacgcacggccagagcaagcctctgaatcagcaggccgaggtccgggtggagggcgcgacgctcgtccgcgcgggcgtcgcggcccccgcgcgccgagctggcagtgacgttgctccggtcgatgagctgcctgccgacagcaccgctgaacgcactcatggtgccaagagacgccccgatgagacatcctcgtcaatcccagtggcccttgctgaggagcaggatccgacgctcgggcatctgacgagcacctcaacgcacctcttgcggctcacgctccctctgccgtcgcccgaccagccggtctcattcgtcctccacccggcacagccgttgtcgtacctctcgcggctcatcgcagctgagctgccggcgtcgcttccagatgttgaggtcgtccactaccgtggcttcggtgagggcggccgatggtcggaggcgaccgacctagccgacttccttcgccagagcgccaacatcaaggccttcgagatcgacctcttgcctgccgctcggcggaccgacggcggagcttacgagcaccctaagcctctcaagagcattaaggtgctcgtcccgtcgttcctctcgcggacgcgcttcctgcgcgaccgattggaccagatcaacgaccacctgcgcgagatggccgacctcaaagcagaatgcgactcactcgccaagcagggcgcaagacgggttgctcttggtggtctcggcggtctggtggcatactgggctgcggttgcggtagggccctcgtgggcagcgctacacgatgaggaaacaaagctgacccgttactttttcttgcaggcggcaacatggcagtggagctggtacgtgctctatctgctaccaggatatgcctcgtcttgctactgactgacctcctgataaccgctctcgtcatcgaagggacatcatggagccggtccgtctttttttcccattgagctgcacgtcgccactgactcctgtctcctctgcgccgccaggtgacatatctcatcggccacggcgtcatcatcggcggctacctctactggctgctacatcggcgggcgccagactacgacgtcatctttacgcggacgatctcgagccggcaggctaagctctacatggagagaggtgccgccccttgacttctcactcgctacagcataagctgacctgcacgacgatcccaggatttgattacgagcgtcaccagagcctgatcgctgccggccgcaagcttcgagaggacatcaccaagatcgcctccgagtacggcgtcgagtgggaggacggcacgcccgacgacatcgtgcgggagggcggcaagtctcggctcagcaagggcaagcgtgaagtccagagcacgatcgacgagagcgtcaagctcgagcggcagagcaaagtcaagacgtcgttcaaggaggaggacgagggcaaggaggatgatgacgacgatgacgaccggggccggattggtcggggaaaggacctcgtcaagaaggagctcagaaagctcgcgcatgccaaggattagatggcgcctgccttccctggccaggacaggcatgtccgtgaaccgactggccggcgaggaccagcgcgtgcacgtcgcgtcggcctcgctgcgcagcggcacatgaacgaggtgcacggccggcggtcagacagacggccgggcagacttccttcaagtcctcatttcgttagcatgagccctcctctgtaccgctcctgttatatcgaccctggtctcgcgatggaatcgctcctgccggctcctgcgtcgtcgacccggggccggggccgagactttgtcttttgcgcgggcgcgccgagcatcacggcgtcgtcgacggttgtcgcttcctcccttccccttcacgaccagccctgtccttcctcgtcaaccccatcgcttgttcgcatcttctcgccaacatggccaacgtccagctgcccaaggagcagagcacggcaatcttcacccactggaagagtcagaaggccaacaaggtccgagccctctcttgtctgccctcgccttgaaccgatcccgctccgacccttggctggtcttcttgagagcggaatcccttgaggaacagattggtcctgacgcctgctgctgctcacgcgctcatccagatctgcttcgactgctcggccaagaacccgacatggtcgagtgtcacgttcggcgtctacctttgtctcgactgctcgtccgtccaccgcaacatgggcgtgcacatcacctttgtccggtgcgtcgacgccctccgcctgcgatttcagatgctgcgagcggacggtctcatcggtactcgagcgagggattgggcatagcggcttgtgcggctcgggctgctcgagggtggtcagcccggccgagctagactcgagctcgctcaaccgaggtcatcgctcgtgcgcggcgctcacccgcctcggccgggttgtgacggatttaggacaacaggccctgctcgttcgctcaaccagaggccaggcactgacggcctaccggacgcttttgcaggtcgaccaacctcgactcgtggtcgtcgacgcagcttcggcggatgaagatgggcggcaacgcattcgcgaccgagttcttcaagaagaatggcggctccaacctgctgacgctccaggacggcaagcagaagtacacgagccgggtcgccggcctgtacaaggaggagctcgagcgccgcatcgctgaggatgagaagcggtacgtctgtcgacgagcaggcttagctgccgagtcggctcgcgcagctcccgctcacgcacgtctcaccttccctccgccaggtttggcgagctgatcttcgtcgagggcgtcaccgacaccaagtcgacggccgcggcctcgtccaacgctgccggcgccgctgacgacgacttctttaactcgttcgactctgcgccggctccgcccaaggctgcgcctgcgcctgcccgcccggcagccgctcctaccgctcccaaggccagctcctcctctgccccgactgcaccgcggacgacgtcctctgcctcgctgcggacgacgacgtcggctactgctggaaccggcgcgcctcggacgatcaactccgcgccgaaggcgatgaagctcggcggcgggtccaagctcggcgcgcgcaaggcgagcgtcacgatcgacttcgaggcggccgagcgtaaggccaaggacgaggaggcgcggatcgctaagctcggctacgaccgcaagaaagaggaggacgagcgcaaggccaaggaggatgaggagaagcggctcaaggcgagcaagattggcgccagcgtcaacaacggctcgcggagctacggctcgtcgagtggcaaaccggccgcgagctcggccccgccgccgcctcggctcggatttggccagacattcgctgccccggcggcgaaggcgtcgccgtcagcctccaacggatcgtcgtacgctgccgccgaggagcggacgtacgcacgcgacaagttcacgagccagaagggtcagttctagtgtctgacgatcgacgtgtcagtctgttgctgacctgctctcgatcccttgtcctcagccatctcgtcggaccagtacttcggccggggctcttacgacccgtcggcgacggccgaggcccagggccggctgcagcagttctcgggcgcgacggccatctcatcgagcgcctactttggccgggacgaggaggaggaggaggcggcccggcaagtccgcgaggaggacggccttgagggactcgagaaggcggcgatggacatggtcggcaaggtcctccaggacgagcgcgtgcagaacctcggcgatgcgatccggaccggtgcactcaaggtcggtgcctgagcgcggtcgagatcttccactgctgaacaccgactgactcgcctcccgccctcccgcagctgtctgactacctggccgacatgtcggtcgagaagtagatccctccgctgtctcgcccgccatcccgctcttgatctccctgcttgccttccctctctctctctgccggtattccatgggcgactcgtgctcagctcatcaggagggtctctgctcaagcaatggcagtgaaactttagacgtattcgcggaggccggagtatcgatacacttgtacttaaggaggaaggtgacgcgattctacagtgggtctcgcacgacggggcgagacagattagggggtggagcgaagaaggagggaggtagggaccgaatgaccgggtgacctgcgccggggaggagcaagtgaggaagattgggcaatctagacgagctggcgcttctcgtccgccgtagactcgccaacgatggccgactcgccatcgagcttcacgctctcgctctcgctaccgacagcggccgcggttgcgcgccagtcggcaaagcagcggatgaccttgcgtcggaggcggagaatgccggaaagcattccgccgaggacggccaagacaacgaacgcgaatggaatcaggtagggcttgtaagcctcgatcgtctagagcggcgcggcgggagagggcgcagtggcacatcgtgcgtcagcagattgacggggacaggcggagcaggacgttcgctcgagacgcacctttccaaggttaaggatgaacttggcgtcgcccttgtgccagctactcgcgccgaggtgctggaacagtggcgtcgtcaccttgccgttcagccggtagtcccacggaaggaccttgagcgtgtcgtgcgcgggcgagaacaggtgcatggccgagaagaagtgacagcctgtgagcgcatggtaaaagcagaacgtcagtcgtcgatcggcagggagactgctgttggcgcgcgcagaaatagacgaaccagtcgagaacatgttggaggcgtaggccgacgagaaccacgacatgtggtaacgcggcaggcgttcgattaggtacgtgaagaaggggtggttgggcttggcgacgatctgcgcagggaggaagggtcagcttcgtgcggactgccgggcagtagctacgggacggacaaaggcgttgttgacgccgatgggctgggccggaggcgtgatgaactcttcagtaaggaatgagtcgagcttgacgcggcagcggaggtcgaggtcgactggcagacatgtgtgcaaggatgcgagaggcaggagtgagcgggtgaacgtcgggcaacagagcgcgcagcggggttccgcgcagagcgcagccgagcgccagacgcacggtagacgccgccatacttgtgcaagacgaggtagcggaggacgtttgaacgcataatctcctgctcgtaaccgcggtagaggtcgaagaggtcggggtactctgccttaacaaaggcatcgccctcggcgtcctcccagagccggaactcccagccctcgccggccgggtgcaaagcgagacacgaggcccgagcctcctcccaggctggccgcatagcgagcccgccgagccggacctggtggatcagccgcgggactgcctcctcggtccggcctggtgctggcttgaggttgacgaggtcaaagccgtcgggtgggctgccgaggaccggggtcgggtacgacgacgagaggaggtatgtcgagccaaggacaaagaagggtacggtccggcgcgagagggcgagccaggccgcggtcgcaaggagcgagaggaggagccagcgatgctgccttgcagtcgacggtaggcgcgagaggaagccgtgagccgaccgacggcggctgcggtggaggtgggcgtgcggcggtggagagggcggcgagccgggcgagctgccgctgggcgaggccgggctcaacatcgagggcgacgacgaccggcgcgtcgaagaaggtagggcgatgcgcatggcaaaagaaggctgacgaccgaggcggaggcgtggcgggaacaggagaaggggacgcgaggtcttggcaggctcagtcgtcgctgagaggtccgctctcgctactgctgagggtggtacaggtgccgcttggaaggaccggcgtcttgtctgtcgagaggggtgcgtgcgcgtctgcaggatgaggcggatgggctgaccgtcacaaaggacgcttgacgaggctgcgtacgccagtcggtggacggcagcaacggctgcggcacacggggctgacacaggaagggacgatcaagggacgtcatccaaagtacggcccgtcggcacgccaaggcctttttcgatcccgttttgcccaccggcagcagagcaggaagcaagacagcagccggggagagggcggtgagcacgagcgagctcttcgagaaggattttgctctcaaagaaagcgcgcagaaaaaccatcgacagaagatgggcttgtgcacgctcgcgctctcccggccggcggctgccgaaagggaggcgctggcacgcgcggccgggtccccgaatccgtctcacagatgcgactgcgacgcctgctgtaggtctgcggcgtcgagccggaccggtcgcacctgtgcctgttgaacaagcgcctgaccaaggacgcgatcaggaggcaactcgcgcagctcaggcaacttaagcaactcaagccactcagacctcaagcttccacactccagccaagcccggactgctcacagcgatcggcagcagaacatcagctcgacctgagattaaatgcaatcagaagggatggcagaagtggtcatgacagagcgtcgaggacgagaagcaacggaccgccggggcgctcagtcacggccactggccgagaaggagccgctgacgccagtcgtcgccctcgagctcatcgacaagtccttcttgaggtgctgtttggacgagccgtcctctccgtcgtcctcgtactcgtcgtcgtcgtcatcgtcactagaggcgcaaggtcgggctgcagtcagtgcctgtcacgccctcgagctgtcatttcagaaaggggacgcactagatgggctcattgaggagcaccgaggtcggcttgaagccgagcgacagcgtcgtgtacaagacggccgtgctgcagggagacggagggcgcaaaccgtcagcaggcaaggagtggcgagcggcaacacagctcggctctctacacacatgaagaacgactgaagccacgcgaacgagtaaaagtgggcgtaggcctccgagacggctatcttcttgttctgtgatggggtcaatcaggagcaggcgacgtcagcgacgactgggaaacgcgaaacgtgaacgatgtcacagacgatcgcatgggcgagacccgggatgttgattggctgatgcagaaggacgtcgagcgcaaagtcagcagccaggctcggatacagttgacagtctcgatcgacgtacgatgacgacgagcagcgtgacaaacgcccgccagttgcactttgtccgcgaaccgtaggtgtagatgccagtcggcttgtagaggtcgggcacggccagcgcctgccgctttgagagccagaaatcggagatgaggaccgagaggatgggcgcaaggacaatggcgtagcccgagaggaaggagaggagcgttgagcccgaggcctggactgagagccgggagacaaagaaggctcgtcagaaggcggcggccgactcatgcagatacccaagacgtacttttccaaggcgccgtcgcccagccgccgacgatggccgtaaagacggcgcctcgccggaggttgaaacagcgcggaaacaggtagacgaggtcgttctgcgaggcgatcgagttggtagaaatgttggtcccagcctgggcgagcataaaggcgcaagcggcaaagaagcgggccgcgcgcgagtcccaactcgagagaatgtcgagcgggttccaaagcgttttgccgtagatgacggtcgaggccgaggcgatagcaatgccgacgagtgaaagacacgagtaggtgacggtgatgtaaagcagctgccagtactggtcattcttgcggcgcgcgtatcggctgcatgggcggtcgaggaaaatggagtcagacaagcatcgcgagctcgacttggaggacagcatgcacgagagatccgggttgttgatcgcaagcgttgtcttgcccgagatggcagagttcagcgcgtagacccaagcccacgacttggttgagccggtgagggtcgagccggccgcaaagatcttgcccgaaccgcctgcggtgtggatcgaccagccgaggagggcgaacgcggcaacgagtacgatgacgctcttggcaaggaaaaggtagcgcatagagcgcggcgggatcatcatgagcggcagctggacgagccagaagacgaagtagccgaccaaggcctgcgttgtaatgccagcggaagcagggctgagagaggcatggatgaaaggtcagcaagcctgcctgatttcgacaatcaccccagcggcagagagttacagcgcgttcttaaccttgaggaacgagggccatatcgctccgagcatgatcgccatgcactggccgccgatctgtgagttgatgccaaagtagatcaaggcgagcatgaggcgcgagacaacggcaaagtaggcgccgtagaagccaaaggccgagcgcgcagagaccgagaacggaatgtggtacctggcagggacaccgtcggcgtaagcgctatagcgacttgccaaatcaaaggccgagagtggactgactgtgcgccgacgatacctgcgagcatcagagggcgatacgagcgtcagcaatcgcacacagctccaagcagaaggcaagatggaccggccgttgagcgtcacgcccgcgctaatgatgaagttgccgacgaccaatgccggaaagacctgcctccacgagaggccgagggcaatcatcgacgacgcctgctgcatcgtgccgacgttcagtccgtcgctggcccagaggaagagatagtcactgtgcaagaaacggggacgtgtaggctaggtaagcagcctgaagcgagaggtgaaggagctgcgaggaggtcgcgcacaaagagcgccctgtgcgcgagagagtcgagggtcaatgaagacatcgagggcaagaagaacgtagtacgtgcgagctcacaggttcgcaggtgcggcggtacaacatccatctgccaggccgtaaattgcgcatcctcttgtcagcgttctacggtgtgactgaacgggctgagcaacgagagagcagccagacggacgtccttgttcgacctgtcaagaggaaagcatgggcggtcaacattgtctcgttttgctcctgccctgcgttgatttgagagaaggcgcgtaccatctggagtccggtgcgaaggagctcggctggtgctcgaccttccagtagttgcggaaaaacctgaccggagaagcgacgtcaatccgacgagaacgattgaagaaggcatgtcagcctcgtgtcagataaagggagaaaagaaaataatcgagagggctggcctcagtcgagcacgcaccactgctgcggctctgggatgaatgtcctggcagagaccatgccgggctttgcttgcttgcgcgggttggcggagccgagaggaaggagcgacggcgacgggaaggagcgagcggtgtggaaggcgaggtgaaggtcgagggagaaaagaaagcgagaccgaccgaccgggggctgctaagggaaggacaagaaaaggaccgggcccagcagcacacgggtagctgtcccctttgcctctttgcgctcgttcagctgcggcctccctctggccgtctgggggtgggccagtcaatgcttggaccggagcattgcaggtcgcgctagtgcgtctcgaggttgaccgctcacgaggtcgttgctgaagaggagtgagcacccctttgcagccaaaggcacgtctgcagcacgccggcgctcttctgttagcttgctgtacgctctgcgacgagccgactgaaggcagcaaacgaccagggcaacgagcagggtcaaaggagagtgagctcgttagcgccgtcttcgacggccgacgacgacgagggacagcaggaggacgagggaccccggagagaagcgaagccgcagatcgccctcgaacggacgtttggcccttgtctacgccacccgacggcgaccctttgatccgagcaagtgcctggtcttcagcctgctgtcttccctgctgtcactcgggttgcgaagggaggaggatgggattgggagcgagctggcccttgtcgtcgtcggagggctgagctcggagggagcgagcaacaacgcaacgcgcggaggcagcgcagcagcagcagttagcaagaccagtcggccgccgactctgcttgcgaaacgtccctcgtggcttgcgatgcaatcgtccgagacggtgcccctcgggtcagctagagtcggactctagtatcacaggccagcagggcatgatggcgacgtcgacgagacggcctgctggggggaggagggcgacgcgcggcccaagcggcgacagcttccgcgccgcctgctgctggccggcggaaggctctgctagtttcgagctggccttctcctctttccaccacatcacccagctctccgtcctcgagcctgcgactccgacagcaaggcagccacgatggacccggccctcgcacgcccagaccagccgctggcaaccgtcggaggaccgacaatcggactcaccagcaacaccgacgatgacggaggcggcgcagcagcagcagcagcagcgccctcgacaggacaggagggcactcgccggcgtcgtcagctgcccttctcgcgttggtcggccaagaaggcgagagttgagaaggaggatgaggagaaggagcccaaggggccgaagccagtgtcgttcttcgccctctaccgcttcgcaacgctggcagagctctgctggctggcggccggcctcgtcgcagcgggtacgtcgctcgctcacttagacctcccacgacaactcgaagctctggctgaccttcctaagatgatgcgctctctctgatgattcctctcagctgtcgccggagcggcgcaaccgcttatgactctgatcctcggccgcttcacgtcgtccttcacggccttcgcccaggtcctcatccggctctcgattgacccgaccgacatcggtgccctggccgggctccgtcaggcccaggacgacctcaaggagggcgccgcacgtaatgcgacctggctaacgatcatcggcatcggcaattttgtcaccatctgtcagttctgagcgaagcaacggccgctcaagccgctcgcttcgcattgctgctgactcgtcatcgtcttgcctaccttgcccgccgtcgcagacttctacgtgagtgcccctccctcgtcaggtcctctgcaccatcgcaggactgacctgcttgactgtggctccccacagatgtcggtcttcgtctggatcggcgagcgcctctccaagcggctgcgcgagcgctatctcgccgccacgctccggcagaacatcgccttttttgacgacgtcggcccgggcgagaccgcgacccggatccagaccgacacgcatctcgtccaggagggtacggctgagaaggttgccctcaccgtctactacgtctctacttttgtcaccgggtgcgtctgcagaccgacagctgccgctcgatacgagcaagactaacaagcatcgagaacggcggcagcttcgtcctggcgtacatccgctcgtggcggctcgctctcgctgtgtcgagcatcctgcccgccatggccgtctttggcggcgtggctggcttcgtcatcactcgcgtgagtcaacccttgtctgcccggtcgcttgctcgctctcgcctttggtctcacacaacgtttgtcaaacgccgatcgatactcagtactcgaccaagaacctggctcacaaggcggcctcgggctcgctcgccgaagaggtgctctcgactgtccggacgtgcaaggcgttcggcatgggccgcgtctttggccggctgttcgagggccacgtcgaggagagcaggctgatcggcttcaagatcgctcgggctgtcggcgcagtcaccggcgcgatgtgtgcgtcgttccgtctcctttctggtggcctgcgctgacgtgcacttcgatctctgaagttttcgtgatctactgcggcgtacgtctctgccctgcttgaagcagtatccccgcgatctgcagctgacgtgaggctcctgctcatacacacagtactgcgtcgctctggtttacggcgcgagattgatcaacatgggctcggtggacagcggcatcgtcgtcaacgtcttgttttccatcttcattggctccttctcgctcatgctggtgactccgcaggtcaatgccatcttcaaaggtacgtccatttgccttctctttctttagcagcgtagagtgatgcttaagtcttccgctcgcctcgtagcgaaaggcgcagcggccaagctctacgagacgattgaccgcgtgccggcgatcgacagcgccgaccagggcggcctccggccggagtcatgcgaaggcaacctctcgctcgaccgagtcagcttctcatacccgagtcggccgggtgtccaagtgctctcggaggtctcggtcgtgcgtctcgcgccgggaatctttttgttgaagaagcgtggaagctgacccgccgatcacatcatcgtctctaggactttcccgccggcaagacggccgccctcgtcggtagctcgggctcaggcaagacaacgatcgtcgcactctttctgcgattctacgatccgagctcgggcgtcgtcctcctcgatgggcgggacattcggacgctcaacgtcaagtggcttcgacaacagattggctacgtccagcaggagccggtccttttcatgcgctcggtccgagagaacatcgaatttggcctgctcgggtcagccctcgagcacgcgccggctgccgagaagacgcgtctcgtcgtagccgccgctcgcaaagccaatgcccatgccttcgtcgagcttctgcccgaaggctacgagacccaggtcggcgaaggcggcatcctcctcagtggcggccagaagcaacggatcgctatcgccagggccatcatctcggacccaaaaattctcctgctcgacgaggcgacctcggcactcgacactgtgtccgaaggcgttgtccaggacgcgctcgacaaggcgagcgccggtcggacgaccatcacgatagctcatcggctttcgaccatcaagggtgggttgcgacgtggccgactgctctcgctctgacggcagctgactttccatcctgccctattttaccctactcgctctcagacgcccacaagatactcgtcatgggcggcggcaaggtgctcgagagcggcagccacgacgagcttctgagcaaggacgacggcgcctacgctcgacttgtgcttgctcagcagattgccgctgcagcaacgcaggcgacgcgcccagttgggtcgagcgaggcaaacgacaaaggatccagcgcagcctcactcgaccggtcggccacggcgagcgaggcatcacccgatcaggagaagctggagctgcaggccttcaaccgagccgaaggccctcttgacgtcgagaaggcgctgaacacacagtcggcacctgtcatcctcggtgaagaaaaggtccttccctatggagtcatcatccgccggctctatcagtgcgtttgacgtagacgattgcgcttctcggatgctgatccacccgctttgatctacaggatcaacaagagcgaccgcagtgcgttttcgttctatcccttcgcttactactctcgctgacgatgaggtgcacggccgcagcgtactacgccttcggcctcatcgcagctcttctcagcggcttcgtcttgtaagttggcgcaacatgcgcactcaccgactcggctaaactgacgcatgctttgcggccgaccagccccggctttgcgatcttgttcggtacgcttcgcgtctgacgcactgcgagacctgaggccggcttgggctgaccccaaatttttcgcgacctgtacttccaaccaggccaagccatcagcaactttaccgagctcgatcccggccggctgcagcgaaagtcagacaggacgtcactctggatcttcatcgtcgctatcgtctcggccgtcgtcgaaggtagccagaactggctcttctcacgcacggcagactcgctcgaggccaaggtccggacgctctcgtttcgtgcgatgctccggagcgacatcgcttggttcgacgcgccgcagcacacggtgcattttgacgttgggagagcctctgtcctcttcttctgaagctgacgagctgttgtgctgccacagactggatcgctcacaagcggcctgaccgaggatgcgacgaagatcactggccttgccggcgtcacacttggtctgtcatcctcctcttgctatccttcttgatcagaacggctgactcggacgtctcctcccacaggcaagatcctcgccgctttcgcgaccgtcggagccgggtacgtttgatgcattggcgcgggtcgcgaccgatcctttgctgacgacgatcaccccgactgctcccgtcctttagcgttgtggtcggtctcatttacggctggcggctcgctctgatcgcggttgcctggtgagtcgcgcaaatctggatcggctgagccgagtcgtcagctgacctaccccgcttctcaacagtttcccggtcatcctcaccgccggtaggtacctgacgcactctcccttccgatcgacagattttgactttgacgcttcccactaggctatatcgagctgaaggtcgtcacgctcaaggacaagcagaacaagcaggcccacgccgactcggcccagtaagttcggcgccaacctttgtgctcggatcactcgctgaccctctccatgtctgcagtcttgcgtgcgaagcggctgggtgcgtgtcccgtcgaccatcctgaactttgtaccgcccttaacctgctttgtttgagaacgctctactccttcagcgcgatcaagacggtggcctccctcacgctcgaggacgaagcctgcgcgcgctacagccaggccctcgttgcgcccctcaagaaaacgcagcacacgctactcaagtcgaacggactcttcgcgctgtcgcaggcggccaacctctgggtcatcgccctcgtcttctgggtcggtgcgcggtggatcgccgagctgcggtacgacatcaacgacttctttgtcgtcctccagtcgaccgtcttcgccgccacgcaagccggcggcgtctttgccttcgtcccggatgcctcgcacgcgcaacagtcgtcgaccaacgtcatccgcctcctcgaccagcgaccggccatcgatatcgagtctgacgccggtcgccaagtcgagtcatccgggcagggccacctccgcttcgaaggcgtctccttcaggtgcaaacgcgtcgtatctccgtctcgcaagccggcgctgactttgatcatcaaaccctcctcagctatccgacacgtccaaatcagtcggtcctcaagaaactgacgtttgacgccccgccgggctcctatgtcgccctcgtcggcgcctcgggctgcggcaagtcgacgacgatccagctgattgagcgcttttatgacccgctcacgggctcgatcacgctcgacggcgtcccgatctcggacctcaacctcaacagctaccggagccaggtcgcgctcgtctcgcaggagccgacgctctatgcgggctcggtccggttcaacatcctcctcggcgccaacaaggccgaggacgaggtgacgcaggccgaactcgagcaggcgtgccggcaggccaacattctcgaattcatcgaaagcctgcccgacggatttgagacggccgtcggtggcaagggcgcccagctcagtggcggccagaagcagcgaatcgcgatcgcccgggctctgatccgcaaccccaaggttctcttgtgcgtccatcactctcgccacgctgctttcgcccatgcctatggctgacccgcgctctcgctctcatattcgcactcggcaggctcgacgaggcgacgtctgctctcgactcgtcgtccgagaaggtcgtccaggccgcgctcgacaacgccgccaagggccggacgacgatgtgcgtggtcgctcgagggacctatgtagactcgcctcagctgaccttctcctcctcctcctctctccctcggccagtgccatcgcccaccgcgttcgtgctcgctctctctctgccagcctgttgtcctatcgctgactgcccctccgccgccgccgccgcctcttacagctctcgacgatccagaacgccgaccagatcttcttcttccgcgacggtcgcgtcgcagagagcggcacgcaccaggagctgctcgcgctcaacggcgggtatgctgagctcgtcaacatgcagcagctctcgcgcaacgcctgatctcccggcttcttcgtctcactctccctcgcgatctcatacccatcctcatacgctttctcactctccttctctctcgccatgtgccgtctacgatgcccccttctgcccgacctcgacagtggtcgcctgcgacaggtcgaacctgcgcagaagaatcggccctgctgtcctgtccgcgcgggccgggcctcggctggagccttgccggcgggcgcgggaggatgatcagctgccaggccgactctactgcgaccatcgctccgaccatcactcctcgactgaccctcacatgtaagtaggcacaaggcaagagcgacagagcgacagcaggcgactgacggccatatgtcgatgattcgatcccaaccgcctgcctcccccaccgattctacccggcccacctcacctcgccaagcccagccgcttcctccagccagccagccaaccagccagtcatgtctgacctcgccgtccgtcccagcccggttctcgagccgttctctcgacctcagcgccctcgagagcaacggagactgacgctcgtgacctgtttcaaaccgatctcgctgcctgtcttgtcccatctgcgctcgcttctgccgctcgcacgacgtcgcccgcctcactgctggtccgcacgcgggcaggccgacggcttcaaagcctcgccgatcctcgtcgtacgtcctctgcgctcccagttcacctcgatttggtcgccgcgctttgctctgcaagctagcggcggcagggctctcgagatcgctccggcagctgacgctcttgcactgcgccctgcccgcctcaatcacccgctcgcccgctgccaccgccgcctacgaattcaggccctcgccgaatcattcaagcagatgtcggccgccgagcgcaaggcggccctcaaaaagacgaacggcgtcttccagctcgatgtcaagccgtcgggcggcggcgacgtccagacgtggacgatcgacctcaagaaggagggcgaggtcgtcaagggcaccaagggcaagcctggtgaggccaattgcccggcctctggacgcgaggatggttgctgacctcgcgctcggacgactcttgccagacgtgacgatcaacctcgacgacgccaccttcgccggccttgtgcgtcgcctctttatgaacgcgctacaggagagcaggttggctgacttgactctctcgcctctttctgctgctttgcttgctgaaatcaataggccgacggcacgctcaagtaggttctcgctcgcccacgcttggctctctaccactggcgcagatactgacttgcaagccggccgcttgtctctccagctcgcagaagatgttcatggtccgtccggctccaagcgcagagccctctcgaccctccactgcaccggctgaccattcactccgtgtttactgacgcgcattcattatcttgccgactctgtttcgtctttaacttccacctcccgacactgctcactggcgaccttcgcctttacagcaaggcaaggttcgtccactgtctctctcgagtcgctagctttgttccgacgaacgatcggtagctgacgctctactccgttcgtccaactcacagctcaaggtcaagggtaacgttatgctcgctgtgcgtcccgccgtctctctttgccgaaactcatggcgccttctggcctcgaccgctgaccttgcacactcgccgctttgatcgacagaccaagctcgacggcgtcctcaagtcgaccaaggccaagctttgaagccgggccatcccgattgttctctcctctgctctcacgacgcgcctctccgaccgcatccccgttcccgccttccttcccttcgagccccggttgtacatagccgcgtcacgggcgcgagcacattgttgtacgccgctctggtcgggccgttcgagataccatcgtccagttcttgaccgacgctggacctaagagcaagcgcgctcggttctggctgcgagtgagggcatagaagcagccctgacgtggaggggagagcttgggtcaggcgctgctggttgaggtctaagcaatatcgtcagtacgccgaccagccgcaaatgccttgcacagatgaaggaaatggagggcttccgtaaatggtaaggcctgtgaggcaacggatgcgactcggctgcgcagcaggacgagcgtcgacggctccgatcgacttcagcccgtcgcttcctcccggccgaccacgaccccgcttcactcagctggactccaggtcaagtcgcgctgttacatctctcgcaaggcccaccccagccgagtacattatcgcgcacgcctcgccgaccgaccttcagctgctctactcgactgccgtccacgacgcctccgagcccctctcgttcctcatcgcctttgcgcgcgcgaccggccgactgaagcgcggtgccgagcccgacctcgacggctcggcccgggccctcctccgcgactggtcgatgggcttcctcccgcgctacacgctccctcccaagggactcacgctcgacccccgtcggccagtggccgacctctcgaccttgagtgcgctgactgagggcgaggccgaggtcctcgcccgagcccgctcgaggagggagatgatgcgctcggaggcaggcggccgggggctcgtcaaaatgacgctcgacgaggactttgtcgaagagggcggagacgtccgggctgtcgtgcttgatgacgaggtccgggagcagtcggcgagcgacagcgacgaggacgacgagatggatgaggacgacgaggagtggacggacgacggcgaggacgaggacgaggacgtcgaggtgcgctttaatccccctttctccttctttctgctcccccgttccgcgtgccgaccctgcatctgcctccatcttctcagatggacgccgccgccgaggcggacgactttgccgagggcgaggtcgaggacgaggacgactctgcgccctctgcgctcgacgtcctactcgcggccaatccgacgctcgtccaaggcgctggcggcggcaacaagccgaagaaggccgccgccgcgtcagcggctgctcctgctcctgcgccggtttcggcagcggcggcggctcctgcgcccgtggccggcaagaagagcaagagggccgtcgccgccggcgcggtcgagaaggagccgaagcgcaaggttgtctttgccggcgagaagccggcgacgaccccgagccgaacacccaaggcccccgtctcgatcctcaaggccggcgctcccgctgccgctgccccgcacgccgccgccggcaagaagggcaagaagctggcgtcggtcgccgccgttgctcccgcgccggcgcccgctgctgctgctgccctcgctgtcggcgtcccgtccaagaaggagcagcgcgagaagaagcgcaaggcctcgaccgtcgaggacgtctcggccacgcctgccgcgcccgtcaaggcgcctaagaaggccaagccggccgccgctgctattgttgcccctactgcgaagaaggccgctgttgcgccggctgccgcgcccgcgcccgtcaagtcgaaggcttccgaccgggcgtcggcaaagggcgaggtcgcctactcgttcgactcgcacttcttttagagcgctggctcccattccaaaaggacggcttgtctttatgacctcgtctcatagaatcccctctggtcgacgtcagtgctcagggcgaagggcgttgacagcgtgatgagcagaaggggggggggcggagccttcttctctgcgccgctgcaagaccaagtcagaggcgccagtgacttgccacgacgctccttctcggctcgcttgccgctcgttcgccaactaggccgacccctccggtgcgttcctgaagcggccgaggaggctcgacggccagacagcgcgcagcagccgaagaacgaccgaccccgcctcggcatcgccgtcggcctgcatcccgcccgtcgccgctgctcgttcaggagccgctcctgaccgagcgacgtcgccgtcgttgtcgctgtcgggcgaatcgactcttgccgcagggaccgccggccggacgtgaaacccgccttgggccttgggcatcgcgcatggcagccctcgcgccagcacagaaggcgatcgttgcgaggccgagcgggcgagcgatagcgctcccttcgtcggcttgacatcgttcggctgcgtttcaggtgagagccggccctcttcgatcatctttgcgcttgagagcgtcgggctgtcggcgctgctgactggaagaggcacgacgcgctcggtgcgccagacggcgacggccgagcgtgcctcttgagtccagccagcccggcaggccatgcgctcagtctcgtccggctgagggctaacggaggagggctcgaactgctcgtcgtcgtcgtcgtcatcatgtgtgcagcggagaaggcgacgtgtgcgccgacttgcagacagccggcaacggcagatgcggaggcgatgacggcgaccgccagtcaaccgacagcgagcgcagagccgaggtctgcgtcgaggcggccgacgcgctcgttgcctgctcagatggtgagggcgacggaacgaccggcttgagtgaccaggtcgactggccgccatcatctccgccaaagcggccggttggtatcagcggcgacgacggatgaggagcgaatcgccttggcacccagtcacggtcattgagtgtctcgcaggaccccatgtgacgctggacgacgagcaggttgaggctcatgaagtgccggcaaaggcagcagacaaatctcgacgtcgtcctgtctcggtgaatgacgatcactggtccgaacgttgacgaggaaggtagcgttagaaaaggacagagaagcagttctcgtctgttactggcagtttccatcccttgcatggaaggctccctccctcaggtgcttgtaggtgcctgcgggagaacgcagtgtcagccctgcctgtcgattgtcagccgcataagccaacgatcaacggtgctcgttcagcgcagcgtatgagataaaccggcggccgtcgggacaatctgggcatacgtaggcgcccgcgacacctgatcgggttcaagcagagcaaacgatttagcggtggagcgccgagtcggcgtctcgctgaaaatgtatgcgcggagggcttggagagctccgaacccgtgacggctactccagcgtcgagcttcgtagtcttgactggcggacagcattcgccggggagggccctcgagtcgggctgcacagactctgcaatgaaaggggcgcagtcggtcaactcgtcattcatcaggcaaggccgagctttgagccagactagacgaggtggagacgcaccttgctcaaacttgagcgtcgagctgctccgtccgtttggtagcctcgacgagctcaggctcgagctcgaggcagccgcgttcgacgggccacctgtcgacacgtgccagagccggtcatgcagcgccttttcggccgccgagcggtagtgctgtgaaggccggcagaggttgcagatccagtctggtgtagagctagctgtcatccgagaggggagaaggaagggagggactgggtagtcgtcgagaggaggagcgatgggtgaggggcgcggacggcgcgcctccgcccgagcgctccaccagcggcgttacgtacgttcgacaagctcggcacttatgcacaggtgtcgatcgtcgacgacagtcgtctccccttggtcgatgggtcaagggagcactcgtgggcgcaaaatcgtggcctgcgagcttgcttgtgggtgacgtccggcgcgggcccgtttctgcgctcgtcctcgcgctctcgggccgtcgtcgaggggtcatgagatcgtgaagttgggggcgtgcggccgggcacaagaggatagggtatgaaagaagataagcgcggtgtcctctcaggaagggatgactgtccgcaaggtctggcaaagaggcaggtgagttagtcagcactctcgagcatccgacaggcgaagacgcgggccgcacctgggccgtcgttgacgcatgcccgaagagaccatgcgtcgctccacgatggagccggacgaggtgctcgttgcagtccgagtcgagaatcttctgacagccctctaggagcgagatctgtgcgacggggaaggaagaagcctggtcagtccggcctcgtgagaatttcaaggcagcccgggccgatgtacctggagcgagaagtcttggagaatcttgatgagcgcatccttgaggccagggatctccatgccgttgcgaatgcgcctgatgagcagcatcgggtcgatgtcggccccgacgttctcgagcagcgcgcggatgaagacttcgacagaggagcgattaggcgtcagtccgagagaccggagcggctgcaagcggggcagagacacgcacgcggcttgtcctccgagtaacgtagaaggtcttcccagaggtcctcgtcatcctgctcgcgggcaaactcaatcgcccgttgaacgtcgccgagccggttgatgatgagcatgagcgcctccttggcgttgcccatccggccgagcaggaagaccatctcggggacgtagtcgtgctgcttgcaaacgaggaaggcctgcgaggtgggagattccgcagtcagcgcgttttcgaggggagagcatgccgacggcggaggcccaccttctccaggctgtagtcgacgccgatccgaagcagctccatcagccgcgggtggtcaaactcggcgcagagggcgatctgatagggtaagagaggacgatcagaactgagaaaaagctacagcgaggcgaagaggaactcacatgttgattgccgtaggcagagacgatgtgcgggtcgtgcgagaagaggcagtcgaggtacatgtaaaggtacttcggctgcgcggccagctgctttgtgacgcggtcgatctggcgagcgaagctggtcagtacctcgtcgcggagggggacggctcttgactttgcgcgcaccggtatggaatggacgtggtcgacgagcagctcgatcgccctcccgtgcttgccgcccgcctcgccgccgggcagcttctcgttcggcggcctcctcgactcgttcccgccaatgaccttctccggtgaatcgtccagctccatgtcgaactcgacgagcagcaacacctggtcctggacggcagaaaagaggttgtgctgccggatgaggtcaaagacgtcgggccggcggaggcggagaaagtagggaagcgccttggccggctggtggttcaggaggaagctgcgacgagagggttgcaaagctggtcagacgacgcgactgggaaaggtggcgcgactggaggactcacagttcggcgaggcactccatcaagattcgctcgccaggctcttccgagaggacgccctcgatcgcattgacgacactcgagacattgtagatctgcggcgaccaggtcttgatggattgaaggagcgcctggcggatcgaccgaggtgcgtcagtgtgaagcctcggatgctggctggaggagagctgcagcacgcaccggccgatcagactgaagcaggaaggcgaggatgagctcgtaaaccatatcgccgagttgcggctgcgaggtcggcacgaaggggatgattgcctcgagctgctgcttttgagcaaagaggaagacccagtcctcccaggcacgcttgtcctggccgaggaccttggcgagcaggctggcagctttctcgtactcgcctgggttgcgcagggaagtatcgtcagccgacgtccacatagggacagagctgaccgctcgtcgttcggacacacctccgcggaccaggctgtcgagaaacttctcgccgatgccacggaccgtcatctcgccctcgccgttaccctctttgccgagcctctcgacgaggtcgagggcctcctcgtaccgccggcgctcgacgagccattcgacccggtcccttccatcccgctcgcgcgcaacgacgacctccttgggcgagaggacgacaaaggctggcggctgcgagagcggcagggggatcagggcgtagtcggagcaacgccacttgagccagccctcgaggccgagtgcgtcggacgacagttcctctcccttgcgcgagacgatacgcagctcgggccgctgcggctcctcatcctcttgtgtctcagcctcgtcgttgtcgttgtcgtagaagccgggggcctccttctcctcgggcgcgaggtaggcaaagacgagaaaggtgtccttgtacgggacgaggccggccatgggcgcatcgagctgaaggatgcccgtgatctcgacatggagagtcgaatgactcgctccagccgtttgcgtgctcccactgccgggcggtaggacggcaccgtggagcgagctcgggcgcgaggtcgcggtcgatgtgcgggtccggatgcggacgagcttgatcgtgtctgcccaagcgacgatgagctgcgtcggctcgtgaataggcgagacattggctggcggcgagatgaatgtcagagacggcttgaagaggtcggctcggggcgcatcgactggtcggtcgatgaaagagagcagtcgctgggactgtgtgtcgtacaacttaacgccctgttgtggtacgggaaaggctcagcaggctgagtagcggcgagtgcgagaggagagacacggacgaggtcgttggcccaagcgacgagcccgctgcgctcccacttgatgttccagatcggtccctcgccctcggccaagaccttctctgcgtgcttgccgtgcccgccgccaccgacaagcccgcccaggccgccgaggtgccagcctttctccatcagcgagagcgagccagagaggccgccgcagacgaacgaccttgacgacgactttgcaaagccgggctggagcgccactgcccgcaccggccgcgcaaacgaatgaatgtagcgctcggtgctgagcaacgagttgatgacgaccttgcctacgagaacatccgtagaaggccttgtcagtgaccgagcttcggcaatcacgagactcgccggacggaccatcaatggagcacgtcccgatgaactcgctgccatcgtccgagatctcgattgtcatcacgctcgcgctgtgcgcccggtactcgttgagcttgacgcccttgtggctgaggacgtagaccataccagcgtgggtaccgatcgcctgtgaacggctgacgggtcaggcgacgccacgtacagtaaaacgagttgcgacgactcacgatgatctgggacgaggcggtgatggccgaggcgctgtccttggcaagcagcgtcgccagaatgggcgtgagcttggagtatttgagcacactacacccgccgaaagagatgtcagggtcagctgtggcttcaattgctggagtggtctggcgggggctggtgaggcgtcggtacgcacggctcctcctcctcttcctcctcctcgacttcgccctcgtcgtcgctctcctcgacgtcctctccgtcgtcctgaatcgatgccgtttcctcgacgtcggacagctgctgagctgaaggcagccgaccagtaccggctttgggcgagcggacgacgtcctcgagtgccttgctgacctcggccttgtcgccctcgcccggaatggcttcgagtacgaggtcgtcgccggcattgcccgctgcgtcctcttcgccgtccgagtcagactcgatgtcgctatcgacgccggccggcgctagaccgggctcgtaggcgccgacagagctggcgataaaggacgcggccggagatgatcccgggctggcgaggtcggcgggtgcccgagatgaggtcgtgctcgactcgtcatccgtcgtgcctgccgcctccgccagctcatcctcgaccaccgaggagggctccatcggctctattggcggaggctcagacgccatcccagctcttgggaggcgaaaaggaagtgttgaggggaaataagacgggtcgacgttgagcggcagccgagcaggctcacctcgagcatcgcccaagcgtcggctcaggtctctccgacccgacgtcgaccctaattcagagccaccctttcctctcgtctcggcaaggatggactacgacccgttcgagatccacatgcagctgctggcgctcatgcgccgactatcggcctcgcaccagtcgatcgacaacgtcgtcgcctttctcgtccgctaccgcgacaagtgcgccgacgacctctgggagtgcgtcacagacgagtgccagaaggtgcgcgagcagtcccgacctctttcttcctggagcagtactcggacgacgagggactacctacaagctcgagctgatccttctcgcccgggtctcgccttgttgccagggctcgcttaacgtccggatcaacatcctctacctgctcgactcgctcttgacgacgctccaggacctcccgccgaccgtcggggcggctgcagcagcagcagcggcggtcagcacggcaactgtcggctcgtcatttgcctcgcagctggccctggcggccgagagctatcctgagtggctcgcccgcgacctcggcaagatcatcggctgggtcgtcccacgcgagaaggagggcctgctcaaccttctgagcgcgaagcaggtgcgactgctccgtcgatctggagatctgcaccggccgagagaactgatcctgagcatgcgccctgttgccagatgcttgagagctggaagacaaagcggctgctgccggccgaggtcctggccggggcactccagactctggaggagcggcgcgcgttgttggtccttcttgctgcagctcactgtcttgccggatattcagctgacgtcgttctttgcaccctctcagggcacatacgcatacagctgagggtacgccatcaaagacgagcggcagcagcagcagcagcagcaagcgccgcaagcggaatggcgccgacggattttcgacggcagagactctgcgacggatggacgaggatcgcgaacgggtaagtccctttcgataggcttcctgcctttgccctcaagatgctgatccttgcgcggcaatgacgttgcagcacaagcgggttcgagaacgcctttgggtcttgccgctgccctcaccccaatcgaccgccttcacgagctcgccgtcgtcggctggtgggcctcctgcctcgcgctcgctagccgctctcctaccatcctcgacaatctcgtcaacactcgcgctgctgccgacgggcgagtcgcctgcaacggcagcgacgacaccgcagtcgcccttcacaccctcgcctgcgtcggcaggtctgcccggcaacgcaagctcgggcggtcgtgcgccacggggcatcgtcgaccgaggcgggctcgaacgggcggtcgaccgcgaatttgaaactggctgggatgacgagctcaggccgtgggacgagctcgaccaggccgagtgtgagcgcgagaacgcgctgtgcttcccggagcgcctcccgccggcatcggatcaacaagtgacggtctgagacaaggcggagattcgacctttggccagcctcctctggcttggccgagagcgctaaactcttcgggcaccgtcccagagtgacgccggcgccctccacgagtcggtctgtcgactggccgctggcggctcgctatgccggcgcctgcggcccgtgcccgacaaacgatcgagttctcggcccatcgcgagtagcagacgcgcatctcccaacgtcggatgccggcgacgctcggcctcctggcagaaggccctgcgcgcctggcagagaccggcggtcgcatggcgggcgcgccgttctctcgtctggccgtcgacccgacgatttcggaacggcagcccgtcgcgctgtttcagccgggatcacatgggcctttctaatcggctcgttgtgctcgcggtcaagaagaaaaaagggcatgcagtgagaggaaatgcgagggggacaagggaagtgtctggggtacaaaggggccggcaggggagagcattccggtcggtacagagcgctggttgctcaagaagaatggcggatgaggatcgaaaggcccagagaggaaaagagaggaagattggaggataggcatgccacgaagggagatggtgtaaggcagcgcgaggaagcagcggcaacctgcgctcgttgccgagggcagcactcgccgacatacggcgacgtccagccgggccgagcggcgcccgtcggcaaccgctcggccgctgcgagagagggccggcgctagtggtatatctcgtgcttgacctgcggctggggctggtggatcgcgtactggtgcggcgggctgtcgtcctcaaagccggcgccgttcggcaaggggtcgcgcgccatcatctcgagcacctggtcgtgcggcgtcaggttagcggctgagaagtagaagggcgggaagcgggggaggactgggttggagctcgggaaggcctgctggtaggcgcccgaggccatcgccgaggcctcgttgagccggctgacgatccggtggacgacgacctcgtacaggccgaccgaagggtagagctgggcaaagatctcgatgattgggcaaaagtcgagccgggcgacgtccagcgtcgccgtaaacgttgggtccgagtcgaagagctcgaggatccgagcgagctgctggagcagccaccacagcaggatcggtcggtggttgatgagcgcggtcgagtacttgccaaatgagtcgctcgccggcatgagcgacttggcgacctcggactgcttggtgagccactcgcgggcggtcgcgctgtggatcatgtcggccgtcccgccgacattgttctggttggcctccttgaccgagtcggcgacaaggaagcgggcggtgacgagccagtcgcgcgactgccagccatacgcgagcttgctaatctgctccggccagggcaccggccggacattgtcgccgctcgtcggtgttgaggactcttggaaataggtctcgatccggaccgtcgtcgcccagacctcgactggaagcgcggaggggagcagaagcagtgacggtcaggagactgcaaagcgagcggcgagcgagaaagatgcagaagcgtcacgcacatgccttgtcgcgcttcacttgtgccggcgaggtcgggtcgtagtgcgaccggatggcaaagttccagagcagagccgtcgtatagtagagcgaccaaacgttcgacttggcgtgcgcggggtcaaacagccgctcgcccgggaagaggagcgcgaagttctcgcagtttgagatgtaccagtcgtcggcccgctcacgccagacctgcggccgtgcagtttgagacggcagaagtcagctttggactcgcacagccaagtccctcagagacgagctaggacgtacattgtgcgagtacatcgagatgctcgccgcgagcgcacacgacgaccatgcgagccgacggctctcgtccttgacgatctcggcgtccgtcggcgtataggacgcggtcgaccatcgcgggcaggcagctatcggaatgcgagagacggtcagtccttgagcgtcaggcgctcaggcgcgagagaaagacttggcacgcaccccagaagggcgagttggtcgtattcatctcggcgtcgaggaccttctccgggtaggtcgtgcacggcactttcgcggccgaagccgggatgcaaggcacctcgccgggcgcaaagcgggacgagcgcgggtcgtctgcgtcgagcgagcagagctggagcgtccggaggacattgtccagcagcctgcagcaaacacttgaccgcgtcagccaactgagcctgcgcgacatcgagcgctcgactcacgtcatggcctgtgccgagcgggcgtccgagtggatcgggtggcaggagatctcgtactgaagaagggcaaacggaacatgtcagcgtcaggaggtgccgcgacagaagcgcgcgcttgctggctcacaagtgccatcaggaaagccgccttggcgaggtcggcgctgcagaggagcatgacaaatgtcagggccggcactcaaaaaacgcggagagcgagatgcaggcaacccactcgatccagccgctgttccagctgctccaaaagttggcgtgggcctgctcgttgagcttgaggccaagaagacggcctgggaagcccttgccgcctggtccgtcccaagaggagagctgggtcgaaagcgccaggacggcatagacgagggcgggctctgcagagggtagtggctagaggtcagtctcctgtctgatgacgcgggcgtcattgccgactcacggagctgctcgcgccgctgtggctggtgcaagattgcgataaagcgtctgcgtagaggagaccgtcgaccgacgatggtcagccatcagagccgccagcaacactgagcaggagcgacgcacggaatgtggaagaaggccgtccagtgattcgagacccggaaaaggtggccgatctcgcccatgatgcgggcgtaggcttcgcgccgggtgctgccatactggccaaggagagcgtcccaccagatcttgcgcgggtagtcggacgtcggctgctttggcagcgtcggggccctttgccaggcggcgagagacatcggctgctgctgctgctgctgctgctgctgctgctgagaaaagtcagggaaagactgggtccggtagctgtgacgaggatcaagccagcgtcagtagtgcagcgagcgcatggatggcgcgagagactcacccttgcgaggcaaaggcgccgttgggccggtcctttggcaggagaaggtcgttcaggacgagccggctcgaccctgggctctcgctccggacgagctcccggccccggctctcggcgcgcgactgcccgccattctcctccggctcagccgcgacgtacgagccagagccgtctggccgagcacggagagccgagccggctgtgtcggggagtatgaagccgtgctcgacgacgcgctcgatcagatggtcgaggatccgatggttcgtctcctttggcggcgcgtaagggtgctcaaagtaggtgacgtcgccgtctggcggggcgtagaacggcgggcgcgaaggggtcgcgaggttgacggcgcgcgggatgacatctggtccattcgaccggtccgacggcagctggtccgggtgcggcttgacctgcgctgccattggcaccggcagatcgacgtgcgaaggcgtctggaacgtgctcattgggcgctgaaaatcggcaagcggcgcgagctgtgacagctggagtgtttgcggctgaggcgcgtagggcgagtgcacgagctgctgctgaccgtgcgctccggcgtcgtgcaggctgctcgacgacgctcccggcccgccctcaccgccgccgccgtccagtgcggtgtaggtggcgaacggaagctgaggcgacggcgtcggctgcgggtagggctgcaggcgttgcggcggggcgatcggcgacgactggacgtggccatcgtaccggacgggcggcgcgagcccggtcgagtagtctggagggccgtcagagaccgcgaccgctgggccatgctgccctggaggtggcggtggacgaggtgtaagcgcgtagcgcgcgtacgacgggtggccgaccgacggcccggctatctgctgctggccgtgatggtacggctcggacgaagggccggcgccgttcagtggctgggagcggcgcatgtagtcgtctatcgtcggcggggcgagtccccactggccgctcagatgctcgtgcgacggcggccccagcgcaaaggctggctgctcctggcgcgcgccacccgtcgacggacccgcggctgagttcgacgaggacgcctctggctgctcgactggcctgctctggacagacggcagcatgacgctcaacggtggcgactcccgagccgaattggcaccctggcctttcgccgtggccgctggctcttcagagtcggaggtctgaggcagcggcgtccgcttccgcttggccttgacgggcaccttgatgccttgcgcccgcatctcctcctcgagcttggtgtcggccgccttctgagctgccgtccggcgcttgcgcccgggcttcttgtctggtcctcgggttcgtctgagcggagggacggagctcgtcgtcagtctcgaggtcgtcgtggagctgacaggggcaaagcagaggcagagaacgcacggcacttcgtcaaacgtgcattcgaaccccttcttcaaacaattatcgcagaccggtttctgtcaagggcacaagacattcagcttcgccggccagcagcattgagtgaaggcgcaaactgggacgcacctggccgtcgcacttgaccttgcgcgaccggctgcagcgagttgtttaggggggttgtcagctgccggccgccgctatccgcgcccttgaaaaggaacgcaccacttgaggcaggcgacgccaaagcgagcggtactgctcttgggccgtcggctgctgctgccgccgcggttgccaccctcgccggccggggcgacgccttcatcggccgtgccgtcaaacgagccgccgccgtcggtccctcctgcagaaggcggcggcaccggctcgaccggctggtaggtcgccaggccgtagaccggctgctctccattatgctgcggatagtagtggggctgcatgtgctggtgctggtgctggggctggggctggtgctggtgctggtgctggtgctggggctggtgctgctggtgatgagcggccgctggatggtaagcgtagagcccgccgcgggccgaggtcgacgcgccgtcgtccatcgccgcttcggctttgcgaggagagggagaggctgtagatttgcacgagagagctcgttcgtgcgtcggcgcaaaagctgagaaagtggttgggcgagcagcgagagccaaggagggaagcgacccgggcggcaggtccgacagggaagggtggagggcaggccaaagacgcgagggcggtgtctgaggctctactagcctcgttcctcctctgctgcggaattaaggggaagagggtggcgggaactccggcgcaggagctgaggggagaaagaagaagaagaagggccgtcggagtgatgattggttgggctcgaagaccatggccggggacaggggaggcgagccgacaagacagctctctctcctcgcagggtcgatgaccagcagcagccagccagccagccagccagccagccagccagccagaaagggcttacagaggccgaagcctcgggtcgcacgctgcttcctctctccacaccgccccatcttgaccccgcctccgagcaacgcgcccttgtccgtccaggccgggatcgcgtgtgtttggcttctcgtgttgcttgcctcgacgtcgaagaatgcccagccggccgcgaccgaccgaggctgctgatgagcacgtcttcaatcggccaaggctctcctcccgctcgcaaaggggaagggccatgcgatctcgggcttgtcgccagctggcaaacgttagagagaaggaggcgatgatgggcatgggttcggcgacggggaccgcacagctgatgggcggccgaatgagggcgggcccgacggccatcggagaaggcgcaacgagggaacaccgtgggctgcggccgattatagcgggagggcggcaagagcggcaggtcgaggggttggaggagcaagaagacagtcggagcattcggcgtcgttcgagggtccgccacgactactcgtcggggcgccgccggcgtcggcggccacctggcgtttctcgatcgcgctaggggaattgtcgagtaggcggccgtgccccgaggaaggggaagatgtccggggcgctagtctgtcggagatcggaatatagcagggcagggttggcgtgccccgtgtgtcggcgttgagtgctgagggagggagggaggcggtggccgaaggtatcgtaaaggggcagagagcgggcagagtagaccgacgtgaccgaccgacgacgtcgagactaggtgtcgtcgagcgtcaggcgggtagaggcaggccgccctcaacagacgacgtcgcttgagcgtacgccgctcgaccggctctgtgtcgatgagcccgactcctcgccggcagcagtcgcgatcggtccgtgccggtggccattgacgacgatgctgaggccgaggacgttgcgcacgctcgtccgggcggaggatggcgagctagcgcccgtaagaccagttggcgtcaccgcgacgacggcctctacgtcggcgtcggcatcggtcgccgcaggtcgggctgggcggatgaggagcgcgatatcctctgtggccgtcgacgttgaccgctcgagccggatgctgccctcgttccacggccgcacgagcgcgcgaggcgagacgggcgtgggcaggtcaccggccgtcagcgaggccgtctcgagccagccgtgctctccaaatgacgatgccggagtcagcggatgtaggccatacgatgaggtcgagacgggcgagaatgacggcggcggtgaggtcggtgggaagttcggcgtgataggcgaggggtcgatgagcggctcgccggcaaacgcaaacacggacgacggcaggcagatgagctcgtagctcgagacagagacgccgtcgttgccgtcggaggcctcggtgcccgagtcgtgatcggtcggcgagccgtcagcaggcgtcgccgggtcgaccgcgttcgggacctgatgctcgaaggctgagaggatctgggtcgcccgtcggaactcgcgctggcggtggatcgagaggtcgccggcacttgcatcgcgccgaagccggcctgagcgaggcgtcgccggcaggtcgcgcacactctggcttgtcgagtggatgacgaccgaggacgagcgcgcgcgggcaaagtgggcgctcgcccagcccgagtcgtcggcgcggtgccggccgcctgcgccgctcccagaagggagtggaggcagcggcgtccaccgagatgagctgccgccatccgagactgacggcggcgggccggcgccgaacttgtagcggagcgaccggatgcgctcgagcgcactctgaggcggcgaccaggcggacgtgtcgctcgagccgtgggatgccgacaggccgccgtcgctcgagctcgcccgaatctgattctgccggcggacgatgaagtaggcgaggccgccaacaagcaggagagcgagcaggactgggacagcgaacagaggaagcttcttgtccaatggtttcggtggcgagagtgggaggtcaggtgcgacgaaggcggccgggcctgaccgtccgctttcggcgggtgacgtatcggaagaggctgtcagcctgacgtacagggccctcgctgtcagccttcttcgtctcagttaaagaagcacagaaagagagggcacgcactcggaacactcggaacggccgctgacgacacggacaggccctggcgagcgccggcgcttccacggctcgaacgacggtgctggatcgcatgttgagggaagcagacgtctggaagaggcgaccgtcagtactcgaacgagggtcaagcgggaagtggaagcgacgtactcggccagccaaaggtcggagagggcaggatggccgagcatgaacgaacgggtagagacagactcatcgtcctcgacctcagcaggcgaggacaaggggaacgcgccgcccatggtctcggccatcggaaccgccgccggctcgccggtgaacttctcctcagctggcgaagctggtggcgcatcctgaccagagggaagggcctcatcaacgaggtcggcctccatctcgatgatcgacgacgaagaaccgctgcgaggaagtgccatcgtaatttcagcgccaggtcgggcctagtcagagcgtatgaagagaaaacttacctagacgaggtgtcagcgtgcgtgatagctgagtgcgagccgacgtccttcgcaatgtcggagtgctgctctccaccagcatcgttgtcatcgtcactgctcttggccgtccgaggaaaggcatcgagacggccggccgcaggcgttcggatcgcccttcgaagctcgagcacctcgctcacgggccctgaagaggccttagtcccggagggagcgggagaggcgccgccgcgtgagggattgccgggacggggacggactggcggcatcggcacaggggcaaggagaggagaggtcgggcgagggaaggcaagaggggtcggaggtgagctggccggctcgagtaaggccgagctgctgcaaaggacgacccgtcttgtcgacggccagactggagagggccccgccagctcggcagccggcgtgaccggtcggctgagcaaggggtggtgtggcagacggaggccggcggaggcatgcgcggagagccggccggatctggcgcggagcagccaggtgagcacctctcgcttcagggcgtcacggcgcgacatgcgagtcggattcgaaggctggtcctccaaagggacctgccgagtatgaggaacgggtgagcaggtgggcgacgctcgatgaggacggtggtggtcagccggtcagcgacgacgcgtcagagcgaaagggtcgagcgcacagcggcagccccctctcctctcctttggccgacagacgcccagtcaacccttccttctacaacgagcctgcagtccagagcaggagctagttccatgcatacctctagacggcaggctcacttgagcatccagagccactccttgagctcggcgagaccgtcctcggcggcgacgtcgcgctcgcccttgtcctcaacggcaccctcggccgtcgcctcgagcacgaccgccggcttcttcttcggctgagcagccgtgctcgtcggagcgccgacccagcctccggcccatgcgacgcccttccagtcttcccagcgccacttcccctcgacgccgcctccaaactgccggaggacctcctcggcctgggccgcgcccgagcccgcgtcgtcgtcgtcgtcgtcgccgagcgtcgtcacacgggcgccctcagccgagagggcttgccggcgggcgttgagctcacgcgtgagggccgtgtgcagcttggggacggcaagcgaccgggcctggacggacggcaggaggtcgagcttggtcgacagcagcagaagtggcgtcggtgccggaggggccgtatacgacagaagaggaaggagcgagctgagcaggcgagcgaaggggtgagcctcggtcagcgacgagacttgggcatcggaagcaagggcgggcgggcagcttgaggggacgtactcgacgacggcgccgacctctttgtctcggccggccttgctaccgtcaacaacgaagacgacggcgacgcgcttgccgccccggacctccttctcgagcagcgcgcggaggccgtcagcgagtcgccgatggcctggatggtcgatcacgcggaatttcttgggcacggtcgacttcgcgaggccggtgttgagctttgtattgggcggcggcggtgggaggacgaagcgcgaggtcgaaggcgtcagggatgagtgagtgagcggccgggcgccctgggtgagctgcaaggcggcggcgacattgtcagctaccggtgagggctggaagatggtcaagcggctcgcactgctgcaaagatggctgtcttgccggcgcccggtggtccgaccaggacgattatccgctcgagtacctggctcgtcgacgagtagaggaggaagatgcctagcaagaggcggtcgacagcaggtcagtcgtcggctcagatgggtcgaggtggggaggaggaagctgagcagcagcacgcacccgtcacgagggcgaggacgacggtcgcaaggaaggcgaccagcgtgtcctcgtcgttaaggaagtcgagaaacgacggaaacaggaatggactgcggcccatcttcggcgcttgagaaatgggcgagacgaaggagattgaggtcgagccgaggtcgtcgagggctcgtcgcgtctcggaggctcggaggaagggcgtcgcccagatggcccagatgctccagatctgggtagacctaggttttgcccgctaggggcggtgcgcgcgcagtcgaaatgacgcggtctgccctgcgagtccctcgctggccagccgcctcctccctgttgcccaacacccaccacccgcctacctcagtcgcctacctcagtcgcctacctcagtcgcctactcaaagatgcccatcacatgtgagtcggcttgaggctgtctctgaaccgtccttgggctgaccgccttgcccgatccaaaagaccagcgcaaagtccgggtacgtcgcgccttccctcgggtctcaccaccgcctcccttcctcgcttggccagacacgagcttgtcaccgcggctggcaaggctggtcagagctgacagtcacctccaactttcgcagaccttccccctcatccccgggctcttttacgtctcattccgaggcatgaagccgcatttctggggtccgtaaatcacccgcagttgcttccgagaccggcctcctgactctgcgttcccttcctctgtcacaggcaagctcggccgcttccgctacgacaagaactagagcggctcgcgagctcgacggtcgctgctgctcttcagagcgacctgcgacctctcctctcgccgtcctcggcctctgttctgtgcgtctcagcgcccgcgaccgctgctcaagctagcggctgatcccagtgcatccttgtcgccttttttcgccagtcacttccgatcttgcgcctcgtccgactcctcacgacctctccgactcgaatacacgatcttccggcctgctctcgactctcaataccccgctctcgacactccgcgccgagcttccctgttgcttgaatcttatcgaccgtcttacaaagactgcctgtcgctcctcgctcgaacggcgcatgcatcatcgcgtttcaaagctgacgctggcaggcagtgacgttcaggtgctgccctgtccgcgccagacgaggtcctcgagccggagaacccagcgctcgcgctcctcgcctctttgctcgacgtcgtcgagcgacatctggtcgtcgtcgtcagtatcagcgccagaggttggcgaagcttgatcggcaacggcagctgcttctttggccgagagggacgaggcagaggctgacccagggaggacggtcgtccgagttgcgcgcagaaaggaggaaggcgagaggacggcgttgtcgagcttcttaacgactgggcagacgaatcgagctgggcagtcagctcgggtgagatccagcgaagaatcgcaaggacgcacggtggcggaagcgccgaacgctgggctcgggcacgatgcgcttcaaggtctccatcatctcgccttctgcttgcggcggttctgaacagaacgagtcagaacccgtatcgacagccgctcctcgtgcgtgccggggtgagaagagtggcagtcccgacggatggaggttcagcccgcgttcgacaccgaccgcctcgtcgtcatcgctgctgctgctaccgtcgtataggccttgactggcgtcagggtagagaatagcggactttgtgggctttgaaggcgggcccatcaacccgcagcgcttatgccagcggacgaccgcctgccactcgtcctcatccattcctgcctcggccgattggacaagtgcgctgggcgacaagcaagcctctccgagaggcgcagatgccgagccttcgagacgaacatcccttccggccgtcgggccgagttcgagcaggtcatccgactgcttgaggagatcgagcgaccgcttgcggcgtgcagcaagcgccggccgttcggcgtcgggggtggtcgcgacggacacgacggccagcaaatgagacttgacgcgatcggccggaagaggggcagagcgaggcgcggccattatcgtcgacccgccggcctccgtgcgaaccgaggtcagtcggaagccggtgcgcttgaacaggaagatagatgctcggtcagcccgggtctcagctcaaatgccggagaggacgcactcgttctgcgagcgctcgcggcttgatctcctgcttcgcctgaacgatgacagggacaggccggacattctcttttgcgtcgaacggcgcgctgactagcgctgcgaggggcgaccggacgacggagccagcctgcttgcggcggctgagagaggccgaccgagaaaccgccgtcgggggagagtcaagcacgccggcgagctgacggagatgttcgacctgtcgttgatcgcctaccaggtcagaatgtgttgtgatctgagcctgcagtgcggtcaaacgattgacttcgcgtgtgagccgttcgcactcggtctcggtcgcccgacgctcgtcttctgcgtcccgactaaccgccatcagctgatcaacctgggctcgcaggtcgagttttgcggccgtctctgtctcgagcgccgcggcttgctcgaccaggagcatcttgagcaaggcgagttgcgactccagctgccgacactgatcaaggccatgctgagaggccagctgctgatcgagggataaagcttgtcagggaaggtctggcatccctcgaagctgagcggtcgaggggggaattgcgtaccttgagaacgtcctcggaggtcctatagccctggtcgtcattctcgccgccgacgtcgagcgtccagcggtcggtacgacggctcaagctcgcatacgtcccggaccactccttgacgatgacgtttggattggccggcgaaggtgggtagttggcgagcacggaagggagcgagaaggacgtcgtcagggccggggcggagcgcggcaggcggggcgagggcggcatggccagggagctggagctcgtttggctggtaggaagacgaggtcgggcgaattagctgctgctcaatgttgccagccgtaggaaaaggcgcgttgacgagggctgccatcagagaggcgccccatcggctgaaggaagggaaggcacggtgtctggccggcgtgcctgagctgggcaaggaggctctggcaggccgccggcgtggtaagcatcagcaaatgaaggcggtgcagacggcagtcagcccaggaggccaagaaattgagctcttgaggcatctgccgggcgtgatagggctgctcgagatggtcgtctggtgaagggagcgacgtcgcgcccctgacaggccggcgacaggcagccgggcaagctgaaacgccctgacacgagacgaccggcagacgacttaggactagcagaccctcgatgggccgctctctacaaagctgagccctcccatctagactgatggacgcgaccggtctcgtcgctcatctggcctgctaagcaggtaggcacggtcgacaggtcgaagtaggctttcaacgatcgcccaggcagcccctttcagcgcgcctcctctgccgcgatggtcgcagcctcttccgcgcgcacgcgccgaccagcctagccagacgcgaggcaggccggcctcgaaagctccccaacacgaccacctgccgtcttgccatcctctcgcccgcacgatgccattcacacctcctcgacctcagccgcctcagcacacgacctcgctcccgtcgtcaaccgtcccgccgctgttcttccccgaggctggcctgccgccgtcacccgcctcacatccaacgactgccccgaccgagaacgccagtcgaccgcttctcctccggcctgtgacaacgggcggtgtcggcggtggtggtgctggccggcggcctgtcagcctccggagtgtcgagacgagcactggcagcgacttctcgctcggactcggcgggagcgatgacggcaacaggccaggcaaagcggtccgattcggcgagggagcgaaagcgaaccgaacggcgacccaggtgcggctctcgtctcgatgcgactggctacaaagtggcagcggctgacccagttctgcgccattgcagtcgatggccgacttcctgcgcaacgtcccaccgccggaggtgccgtcgccgacgcgctcggccatgtcagcgcccgaaaagacgcgcaaggcttccggccggctgtttggcctcggccggcttggccagaaggatactggcagcagcgaggagcagcggacgccctcactcgcgccgccgtcgcagatgactggcctccagaaggtcatcacgccgtccgggtgcgtccaggatcgcttgctctaccttgagaatgactctagactgacaaattccctggccctcgctcgcctcccaacctgcaggcagaccgtccacatcatcattcctcgcccctctcccggcccctcgtttggcgcggccgccgggaccgacgtcccacaccaacactcgtcgggagcttcgacctcgtcagcagcctcagagacctcgagcggaccgcccgtcctgcccgagctccgtaccttttcggacgatgagcgcgaccacggccatggccagcgacaccgagtcgcgtcgtcctctaacgagtgccgtgcggacgacaacgcacttggcagtggcaggacgacatggtcgagccaggcgtccgagacgtcggccagacagcacagccagcagacctcgtcgtcgctcttggcccctcctccgctccaccacgcccattcaccaggtcgatcagcctcggcagcctcgcaggccacagcagtcccgcagatcgtcatccccacatcctcggcctcgaccgagtcgagccaacagagcaagcgcaaagtgctcgagcgcgaagccctcaccctcgagctgctcggtcagcggatcgagcgcgacgcccagggcgagctcgtcctctcgcggcgcgtctcaaagcgaaccgtcggcgcccagaccaacatcagcgccgtgaggtcgctccttgagctgagccgcgagcggacgacgacgaatcggtcgacccggtcgaccgagagcggcacgtcgtctggcatcccgccctcgccggccctcatccgcggtaagacgctcgtgacgccgacggtgtcgccggccagggacgtcgttgcggccgcctctgcagccgccaggaagcgcaacccgtcgattgagccagacgcgagcctcgttgggggcgagtcagacgaggaccagacgcggtcggcgacgagctcggccggcacgtttggccctcgctcgcccggtgcgagctcgacggcttctggcggcggtgcatcgcagagctcgacccggttgacaccgccgccgctcgtctcacacgactcgcgcgcgagcgtctcgtccgccgcgtccggctcgagctggtcggtcccgacaccgtcatcgacgccggcgtttggctcgctctcgcccccgcagagcctcaagagcggcggcggcatgcgcaaggcgacctcgggctcgcgcctccggccgtcgaccgcgccaacgagcgccctgccctcgcctgatgcgagagaccgcgaggcgctcgagagccgcctgaaggcgtctgaggagcggctcgcgcaagagactgagcgtcggcgcgaggcagagcgcagactcaagcgcctgcaggtcagctcgcgcgagggccgagcgaggtgggaggacatggccggttgggcggtcgaggtgccgcctgccaacccctcgtcagcgaccgcgtaagagatgactgacgtctgcgccgtcgcacgcaccctccaggtcatcgagtcggccgacaaggaccggcacctgctcggcctcgaaaacgcccggctccagcgcacgctcgagctctaccgcgctcactttggcgactacgagttggcgccgtcgtcagcagaggcgagcgactgagtgctcgtttctgagcttccgcccgtcgtgccctcttctcaccccttaccctccaggttctgccctgcctcttgccttcttgccagcccatgtcttccttggtttccttgtttctgcctcgatccctcagtccccgccaggccctacagccgcgtgcggcaatgtacgcccatccacgctcattaccttccccttctggtcagcacccggttcattgagtcttcgtcgtgacaatcgatgattgctcgtcttcggagtcaaggaggccccatgcgatcgggccaccagtcttcatctcacgctctaccagcgccactcggaggtcgaggcgccctcgatcttgacttttttgcggtgtgtcggccggtgggcgttcgggccctgaatctgcatcttgtgcagctcgtgcaggtgcttggcatcgacctgcgaaaggaagggcgacgggcattgtcagcgacggcagaagtcagggcaagcagctgccagaccgaccttctcgacgtgcgttttgtcctccttgaggacaaagtagatccgcgcggacttcttgagtttctgcggaaggttggatcggccaaggggaataggcccagtggtcagcgtcgagcgaaaggggagagcagggggccgttgccacgcaccacgccggaccgtccgcggcccatgatggcgatgcgcttgatgacgattcccttctccgcgtaggcttcgtctgaaggcgagcgaggcaaggcacgtcagcggcgatcgaaggaggatgcgagatgcagaggtaagagagagggccgaacggatgaagagtcgctcctcattcaggcccttctcgatcgcccggcgcttgccctcgagtagactcgtgtagagccggatcgcgctccgcttctcgctgaatttgagctggaggagcgcctcgtcgacgggcatgcgccggatcaggcgggcgacccgattgagcttccacacggacgagtcaaacgggtccgtcttccagcggcactcgtcggccgcgccgtcctgggcgaccttgagccgccggtcgtagagcgtcttgcgccgcccgttcgcccacatctcgggcgaccacttctggtcggccagccgcttgaggacggcctcgcgcgactcctgctcgggcgccgccggcgtgtcggacggctgggccaagccagccttgactgccgccttctcatcggcctcgatgacctcggccgggacgtctggccgctcgtcaatctcgctctcgagctcatcgagcagcgacgtcgacgtcgtgttcgacaacgacgaggcgtacgaccgccgggtggccgtgagcatcgacgccgccggcgtacgagcgagcgagcggagcacgagcggcgaggtcgaaacggcaacggcagctcgtgacggcttgagcaggctgatcgttgacaagtggaacaggcggtctgtcagcgacgggcgctgcctagggagcagcatgctcgacgcacctcgagcagctacggctgctgctgctgctgctgctgccggcggcggagctgacgcccgcgacggcggcccgcccgccagctaccagtcgtgtgagcccgcgcatcgagtgcaaagggacagagtcgggtctagggcgacgatctccgctggcaggtctgtaggtgctttcggcctagggcttgcgggttgtggctggtgagggtgagcaggcaggcaaggctcgagtagactggctcaagctgggcctcttttcccccgccggcgcgcgcctgcgcgagaggcggcggcggcggcgcaggccagcaaggccagcagagagagatggtcggctgcttccttcgccctctcaccctctctcgagctctcggacacccggcaaatctctctttttctccctactctagatcacgaccaaagaaggccacgtcttctcccgtcccgcgatgctcctgccctcgctcctggcgctcctggcgctgccagccctggcggtcgccgcgccggcacccttccagaacacggctctcgtccggacgatcgacctcggcggtgcgacgtcgctcatgacgacgacctacacggccaggtcgatctcggttaagcttgagtcgacgtacgagctccttgtcggccgggccgagtgggaggccaagggctggttcgaggtccgagagaagaagagccggggcactgctgcggccgccggcctgaacgacggcggcctgacgtggaccgtcggcgcctacgacgtctcgctgtgagtgaagaggacgggaatgggtgattgagcagtcgcttctgctgctggctgacgctggctgctcctgctcgccctcccttcccagcgacgcctacccggtcaccgttctcctcccgacgccgctcgaggccggccagtcggtcacgctgacggcctcactcacgtcgacgcacgcctcgaccgccaagccggccgagatcagccagactgaggagcagttcctgctctggcggggtgacgccggcgtcaagagtcgctacgagacggacgtcgcgcgcatcaagatccggtgcgttcctcgtcctcatcctgcgctgcgccggccctatgccagcccgtgaagcctcgatgcgatcatctgacgcttcctctcccgtctttttgacagcgcaccgacgcccaacattctctcgcactcgcccttccctgacacgccctacattcgcgattcgaccttgacgaaggccggcccggcaattacgctcggcccgtaccacgacttcccgggcctgactgagctcgggctcgacaactttgaggtccactaccagtttggcgagccgctcgtcagcgctcggacgctcaagcgggctgtcgaggtgcgttacggtaagggataagctgggcaagggtcgcgagctgaccggtgccatgcctcaaaagatcagccactggggcagcaacctcaacgtccaggatgacatcgctctcgtcaactctggcccgacgtgcgtcattgaagctcagcagtcaagtcatgctgagtctgaggctgaccgtctgcgcgccgcccttccatctcagcctcaagggccagttttcgcggatcgaccacctcaaggccaagcaccatcggcgcaatccgccgacgacgctctcggacctgacgctccgcctgccggcctcggcccgggacccttactattacgacatcatcggcaacgtttcgacttcgcacttccggccgccgaccgcctcgacggccggcctctcggcggcggccaaggcccgagctgccaacgccggtgcgccggtcaagaaggacgacttttcgacgctcgagctccggccgcggtatccgatcctcggcggctggaactatacgtttacgatcggctgggaccagccgctggccgagagcgtccgccggacggccgagggcgagtacgtgcttgccgtgccgttcgtcgtcgccggtctgcgcgacctcgtctgggaggacgtcgagtttgtcgtcatcctgcccgagggcgcgacgtacgttccctctgtccctttccgagtccacctcaccccttgcaccctggaactgaccggcgacgcccccctttcccacctggctcagtgacgtcaaggtggcgacgcccttcccgctcgagacgccggccgagcactacatccacacggcttacctcgacactctcggccgcccggcggtccgcctccgcaaggcccgctgcaccgagcagtgcgcgacgtccggccctgtgctcgtgcgttctcgacctgagcctgcgtcgttgccttgtcgctcgtttgactgatgtcgcgtcctccgctgttgctcaggtctcgtatcggctctcgacctggcggcactggcagaagtcggcggcgatcacgctcgttttgctcggctccttcctcggcatcggcgccctccgtcagggttggtccaacggcgacgacgacgaggtcgagacgaccaaggtccgggtgacggccgtcaaaaaagccatctagagcgttgaatggacgcagctggctgtgaggaaggcggcggcggcaggatgatgggggagcggcgccgacacgccaaagagggaaggccggccctccgaaaacaatgtgcccccttgcgcttccgaactgctgcgagagtcgccgacgggagccgcgccttcgacagaggatctgctctggcccgacgagagccgacggcgacgccttcgggcggggtcggcccatgcctctgcgtcgcgtccctgcacgaacggcagcgacaggagcggaggttcatgcaaagcgtcgggtcggccggtcgcccgttgccgcaaagggcgctgcgcccttgccgcatctctctctcaaccagaacccctccttcccaacccctccccccaacccactcttcttttaaatttaaaatggctatcaccaaggtcttcgcccgccaggtgcgtccttcttgcctgctgcttgaaggtcgggacgcgtcttgctgaccctctggccgtctcgccgtccctccgatagatcttcgactcgcgtggaaaccccaccgtcgaggtcgacctctacacggtacgtcctgcattcttctcccacgctgagcggctggcgggtcgcctcacgcctggcctccaagtctggctcgtccttgcaaacgagggaagagtcaaagcgaggcggcagtggcctgtcctcgccttgcccttcggagggcgcgacttttcagcctcgccctcgcgcgcgtcgacccctggcttcgctcccccagccgactcgaatccaatcgatagggagactgacccttccccgccttttttcttcttccgtcgtctctctcacagtccaagggcaagttcacctcggccgtcccctcgggcgcctcgaccggtgtccacgaggctgtcgagctccgtgacggcgacaagaacgcctacatgggcaagggtccgtgcccttctctctgttgatcagctccgacctcgccctgacaatcaacaatcctcttcaggtgttctcaccgccgttaagaacgtcaacgaggtcctcggccccgcgctcgtctcgtccggccttgaggctacccagcagaaggagatcgacgacctcctcatcaagactgacggcgtgcgtctctacgaacccgtctcttgtcgatttagctgcgcgagctgacttgggcccatctttgatgtaaacagacccccaacaagggcaagcttggcgccaacgccatccttggtgtctcgatggccgcctcggaggccggtgccgctgagaagggcgtcccgctctaccagcacctcgccgagattgccggcgtcaagaccccttacatcctccccgtcccgtgcttcaacgtcatcaacggtggctcgcacgccggcaacgcgctcgccttccaggagttcatggtcctcccgaccggcgctgagtgagtgcgatccttggctcgctggcgacaaggcgctgaccaattctgcttccttccaggaccttcaccgaggctatgaagatgggcactgaggtctaccacaacctcaagaaggtcatcaacgccaagtacggcattgacgccaccaacgtcggcgacgagggtggctttgcccccaacgtctcgggcgcgaccgagtcgctcgacctgctcgtcgaggccatcgagaaggctggctacacgggcaagatttcgatcgcgcttgacgttgcctcgtccgagttctacaaggacggcaagtacgacctcgactttaagaacgagaactcggacccgtccaagtggctcaccggcaaggagctcgcccaggagtacaacgagatgattgccaagtaccccatcatctcgatcgaggacccctttgaccaggacgactgggagtcgtggacccacctcacgtccgacgcccagtaccaggttgtcggcgacgacctgaccgtcaccaacgtcgagcgcatcaagacggccattgagaagaagtcgtgcaacggtctcctcctcaagatcaaccagatcggtgcctccccccgcctctcgacggtcggctggtctgtccgttgcctgcgctgacgcccttcctccccctcgcccgccgccaggcacgatctccgagtcgattcaggcgacgcagctcgcccaggagtccaactggggcgtcatgacgtcgcaccggtcgggcgagaccgagtcggtctacatcgctgacctggtcgttgccctgcgcaccggccagatcaagactggaggtcggtccctccggtcttgtccgccctctagggagcctttaaaatgcctgactgactctttaaacccttgaaacgccttaaaacctctagcgccgtgccggtccgaacgggtcgccaaagttcgtccgctttctcttgctgtgcctcttgcggccttcgccgtccttctagagctgctgctgaccctgcttgccctctcttctgtcctgcgtcctgctctgctttctcctcctgctccctctacccggctcattgcctgtccttcctgcccactctccccccttcgtcccctgttcgttcctcgtatccccccccccgccttcgcccgtgtctctgtctgtctgtctgtctgtcgaccacgctcgcactgcgtcctattccgcatgccatcctacagatcgccaaagtcaaggctcgtgctgatgccgccgccgccaacggtccccgccgcccgcttgtgggtccgaccgccgccgccgtcatcgtcgtccgaatcggagccgtcgtcgtcgccagcggccgccttcccgtcgcttgacgccgccttgccatccgtcgccgggacggcctcggcccggccgcctgccgtcttgagccgcttgcgctcgcgcacgagctccttccagtcctcgacctcctccgacgcatagtctgagctctcgtcctcttcgccgcccttggcccgctcgggcgcgttctgcgccctgtcgtacgcccgcttcgcgagcttgcgctccttccggacgtccttctccgtcttgtgctccgtctttttcgaccaggcaaccgacggctcggcgtgcttgtggacaatcttgggcttcgggacggccagctcggcctgccgctggacctcgcgcggctttgaggcataagcgtacgtcgtccactaaaagagagagagagaggttagtctcgaaagcagcgcaaccttaggagcagagtgggtcaggacgcacgtcgacggccgcatcgcgccagatccaaccgcgctcggcatcgagctcatcgtcgtcctcgacgagctcgccagcctcgcgtttcgccgcccgcgccgtccgcttcgcatcggctgcctcgagccgcttgcgccactccttgacctccttgccgccgggcaggcggacgacgcccatgtcgcgcccgagcccgccgaggtcgagcttgccgagcgggaaaatgtaaccggcctcgtgcttcgagtacgcccggaggaacgaagtgaaggccttggccgcccggtcgtggaggtcgcggtccgtcaggatgatggcccgcatgtccttgagcagcgccggcgtgtcgtcggccccggcggccgaggtcgacgcttcgggcgcggcgtcctgagtcggtgtcgtcgggtagggcgcgagagggatgccgcggaggttgagaaactcgacatagtcctcctcgcggccctcaagcacaaagacgacggcccgacccttgcggccggcgcgcgccgtccgaccgcagcggtgggcaaacgtctttgggtcgaccggcgggtcgtattgaatgacgacgtcgacgtcgggcaggtcgagcccgcgcgaggcaacgtcggtgcagagcagaagcgagggcgcaaacgacgtcgacgggtgggacgagaacttggcgagcgtcgccgtcctcgtcgctggcggcaggtggccgtgcagggtcgagatcgtatagtcggccagctggggcagcttcgacaggatctggaagaggaggagggtgaggggtcagtgggccgagcgtcaatcgtaatcaccttgcgcgacgcacccggtagaagtagtcgacctgactgcaggtcgccatgtagacgatgaatttgccgccgccgacgtcgccctcgtcgacaccgcggtggcgctcctcctcgagcacgcggagcagagcctcagtcttgccgccgtttgggacgacgcggaacatgttcttgagcccggccggcgtccggcgctccttgcccttgccctcggcgcccgaggcggtcaacgtcttgatgctcgccttgacgacgacccggaccgggttgcggaggcccatgcggatgagctcggacgaggcctcggtgagcgtcgccgagaagaggcccgtccggcgctgctttggcaggctcgaaaggatacgggtcaggctcgcctggaagccgaggtcgagcagccggtccgcctcgtcgaggacgaggacctcgagcgtcgtcgtccggacgaccgaccgaccgttgcgcgattggagaaactcttcgagcctgccgggcgtgccgatgacgatcggcgtctgctgggcgagaaatcgctggatgtcggcccgcggcgttgactgcttagtgctgatcaggaggagcggcgtcggcagcggcgaggctgggtcgtgcgcggtcgagaaggccgtctcagagtcggccgagtccttaaagtcggatgcggcttgctcctcttcggtcggcggcgggggccggcagaactgctggaagacggcgtgtatctgggtggcgagctctctgcaagggcggcggcaacggattcgagacttcagcgagctgcactcaagggggggggaaaggaacggctgcgggcgagccgactgacctcgtcggcgagacgatgagcgccccgacctggcccttttcatactcgccccgctcagcgatccgccgggcgagccggtcgagcacgggcaggacaaaggcgagcgtcttgcctgagccggtgacggcctcgacgacgacgtccttgttgcggctgaagagcgggatcgtcgacgcctggacgggcgtcattcggtcgaagtggaggtcgccgagccggctctggaggaagggctcgagcgccggcgagagcgtcgagaacgcgggcgcgtacgctgggatcgacatcgggagcggcgaggtttgggcggtcgtcggtcggccggtcgtcgtaaagggggtgcccgggcggcctggcaagattctgccctgccgggcgcgctcgactgactgcgcctgcgggcggcggcgtcaagggttcagcccagcagcagcacgacgacgcgtctcgccaaccgtcaacgccctcctcctcctcatctagcgacatacatcagcatgcccgtccatcacacgccccttcgtcggatctcacaaggctcgctccaccaatcggccaatgccggccagctcgcgagctcgccctcgccgaccgggctcgacttcctgccgatccacgacctcgtcgacgagctcgagacgctcaaccagaatctcgaggtgatggagcgcctgacgagctcgctcgcgaagttcaacgagggctttgccatgttctcgtacggcctcaggatgagcgccttttcggtcgagtggtctgaggcgccagacgagacgacttgggagcgcgtcgcactcgaggaggagcgcgagcgccaacatcagggtacacgtccgagccaggccatccgagtcctctgctgccatcgctgacacgctctgccttggctgcgccaatctctcagccgagctcgaggctcaggcggcagcccacgcgcggctcaatccgccgtcgttacccgactcgcccggccggtacggaggcggcggcggcgccgacacgacgtaccacacccagtattcgtcgacggccgacgaggatcaggagcgggcccgcgtcattaacccgcgaggcaccgttcgaggccgagggatcgcacggggccgcgggcggggcggcgcaggcggtatcccggtcgctcaacgccggcaacgcgaggtgagagaggctccttcgcgtgggcggttggcctccgtcgcgctctgtactgacttgtctcgcacactcaggcacagatcaattcgctcatagacacgttgccgctcgagttccgtggctcgcaaccggtgcgtctcttgcgcgggcacgcgtcggcggtatcattctggctgatgaggccgcctcctgccacaggccctgcgagacgccatggccaaggtgatcggcgagctgatgggtcatccggaaggccgccgcagtgagtcgtccttgcagcatctgccgccatgactgaatcatcatcactgacgttggcctcgcccttcactgcgccagtggccgacctcgtgtcgagcgacctgccccagatcaaggtcaaccgctgcctgattgcgctcgtcggtaagaaggccgtcaccaaggtcaacgaaggcgtgagtctatcgctgctgctttgttgggacctttccacggtgctgacctcggcctgcgtgccccgtctggcagggcgtcgccaactatgtcctcgtcgccctcggtggctcggagaagcgctagccagatctgggtcttttcatattctgtccacatcgcctgccaacgcctcttttgataagggtctacgcaaacatcttgctgaaggccgagcgctcgcgctgtttgcgctcctgctgtcgggcctggacgcgcgcgagcaggtgcgggatggccgcgtcggccggaacgagtgccttggcggccgtcaggtcggcctcggcgccctcgtcattcttcatctcgtagccggcgagcgcccggcggtagagcgccttggcctcctcctcgggcttcaggggcgtgagcttaagcgcctgagtcgtcagaagaaaggcgagcgagctgcagaaaggcgagatcagtcaatcgtcctgcctttgaggcgtgcgagccagaaacttacgcgttgggcttgggcgtcaacttgagcgcgcagagggcggcgttggtgaggagcgggaaacggagcgccttgaaggcggcgacgtcctcgtcgtccgggtacgggtgctggtcgaggtaccggaccgccttctggtacttgtcgagcgcggtcgcaaagtcgccggccttgaaggcgtcggttccaatctgcttgagctcggtcgcaatcgcgagcgccgccgagggctcgtccttgagcgagtcctcgtcctcgggcctgtcagagagtgagccgtcacgtcagcctgcgccgagacttgaagtcgcagcgctgggacgcaccagtcctcgtaccggtccttgcctgccttgcctgcctcggtcgagctcagcgcctgccagtcctcctcggccaggactccgcagtcggcaatcttgacgtcctcgaccggcttgtccgacaccgtctcgagcgactcgatcttccggacgagcgacttgttcgagatgacctgaccaaagacaacgtgctgcagggcgagaagattggggtcaatcgaagtgccgggaagccggcaatccggagttgcgcaccttgccgtcgagatggctcggcgccgaggtcgtgatgaagaactacatccggcaagcgagtaagggctggatcagtcgtgtttggctgcaaaagggaagagtgtagaagggcgacagacctgcgagccgttcgtgccggggcctgcagagcgagtcgagctgtgagcttcgagcgatgacccagccgggctgcaggctacgcaccggcgttggccatcgacagctggaacttcttgttgtgcttgatctcaaagttctcgtcctcaaacttctcgccgtagatgctctcgccgccggtgccgttgccgcgggtgaagtcacctgaggagcgaggagcgtcagtcgtctgccatctgtgttatgcagctcgcaagacgactcaccgccctgcagcatgaaacccttgatgcagcggtggaagagcgagccctgcgacgatcaaagacgagccgtgctcagccgggagggagggacgaggcaagccggcgcctgctgacgcactttgtacgtcaggtccttgctgccgtcgacagtcttgccgccctcgcccgtgcagagctggcggaagttctcggcctgagagatatgcgcagcgagtcagctgtcagtctggcagttcaggaagcgatcgcagggctggacagacggtcttcgggctggagaaagggggagccgctggagcatgtcagctcgtgcgccggacgaaggcaagcggcaagaacaacagcacccacacgacgtcagagaaaagctcaaagacgatgcgaccggccgcctggcctccgatcgtcatatcgaagaagaccttgggccggacaggggcaggagcagaggcgtcggcagacatgttggcgaggcgactcgagctgttggcaagcggccggatgccagtgcggagggagagcgtcagcacgctaggctcgctcgacagtgctccgacagatactgtcacgacaagacgatcttcccagacgcacaggagtgtctagagtaggacgaagcgagggaagggtgcgagaggcgatggacgtcggagggtgctttcgagcaggctcgcactccagctgaagtcgacgacgaggtcgagtgagctgccaacgccatctctagcgagcgagcagaactacagggcagcagctaaccgcactccaggacacggccttccctcgccctcgccatgtcgacgctctttacaacgtttccgccgccatcggtccagctcctgctcgcctggttccgggcgcgcgacgtcttcctcgacgtccggctcgagctccgcgagacgaccgacagcggctgggccgtctttgcctgcgaggcgattaacctggacgagaccagtcagtgctgccgggtcgagcatgatgctgccgtctgataatcttgtaaatcagccgctgacccctcgtagacgcgcctgttcttccctcctcccagtctgccggacgccaaaggcggccatgttcagccgacggacgtcgtccctcgatgtgtcgctcggtccaggatccgagctcctccctccgacgcacgtcctcgctctgcacctcctgcacgagatactgcttgggccgaagcgcacgcccttcagtggctacctccagtcgctcccgcgcgacccgccgccgatcgccatgctctgggagacttgggccggcaaagatgggaagcgcgcatggccgctcgctcggagcggcgagatcggtcggaggctacgggcgagcgagagatcgcttggaaaggctcgtgtcggcggacgagaggtcgagtggggggctggcggcattgtacgtacgtctgggtgcacctgcggctgagcgtagggagcctaacgtcttcttctttcctcctacgaatgacaggcttcgctcaagcgcttctacgacgagttcgtgctaccgaccctacttgacgcgcccttgctcgcggccctgtccgtcgacgcacggcggccgaccttcgacacgttcctccatgcctacgcactcgtttcgtcgcgctgcttcacgatcgacacttaccaccagatcagcctcgtgccgctggcagacatgtgagtggacttcctgtcctgtctgaagcagtctctcctcatgtgcagaaacctgacttgccgcccctctgcagcttcaaccactcgcccgaccatcaggcccactttacggtcgacgaattcgtctgcgggacgtgcggctcgctcgtgccctgctcgcacgacgcgcctcgctcggggcctggcgtcttgccggcccgcctcgctcatctgcacgagtttgaggagcgcgacctactcgccatcttcagcggcgccgactccggcgacatctgcgcaaagtgagtcgcttgctcgacgctgatcttgccgtaaaagcactgacggaggcgcttcttttggcagctcgctgatcgaagcaggcgacgaggttttcaactcgtacggcaacctgagcagcgcgcacctcgcttgcgagtacggtttcgtcccggccgaggctggcacgctacccgaggatcgtgtgcactttgatctcgatcctccagcctcctccgcctcgacgatagctcgttctgtgaacgactcgctcttcgcagcgcggccgcatccgctggtggaaccctccgtcctctcggcgcacctttcaccggacgaccgactgtttgtctcggctgacggccagctgtcagaggccctctttctggcgctcgccgagcgagccgaactggccgaacgaacggaggccgtcgaggtcctacacgatgccggcgagttcctaacggaaaagtgggggaggctgcgaagtgccgtcatttccgccctcgatgccaagcttgccactcacgagggccaggaggcgctcctcgacctgcttgaagtgagcactcccgcttatccgccttctttctaaaatttacactgatctaagcccctgtgctctgcaggacgaagcagtcggccccctcactcacatggcatcgaccctcgcgctcgccgagcgggcgaccctcgatgcctgtcgctcgcagtggctcgaggctggaggggaggaggcgcgagaatcatgacctgatcatcaagagtcgagatggcgggcgtgactaaaagggctgctgcccggcggagataagtaaggaggggggcagagtgcgggaatgaagttacagtgctgggcagtcgcgcaagcgcgcgattgctgatataggggaaagatgcaaaaaagagtccgattgttgaaagtcaaagctagcgtctagtcgtaaatagggagcggcatgatcttgtccgcgttgaaaagctgatggtacgagtacgaggcggtcagcagcgggtcgatccgatctgagacggtattcaaaggacgcacaaagttgttgccgaggtcctcggtctcaagaaagcgcgtggggaagacgactgtcatcagggtggcggaatgtcagcgagcgagtcgtctccaggcaaacgaccggcagcgagacgacgagaaagacgcaccgagatggccacggatctcgccgaggagctcctccatcttgtcttgctcccacttgctccagccctctgccgggcccgagagggagggcaaatcgtcttcggcagcgccgccgaggctggcgcgggacctgttgctcttggaccggttgagctcgggcccgccgccgtcgcccatgagcggctgcgagtcgtcggcaccaccgtggccctggccgacgacgccgccgcccgtgcctccaccgccggcgccatgcgtgccaggcccgccatggatagggaccgcctgcttgatgccgtgcagaacggtaccctcggctggcggcttgttgaacttttcggcgtggctcgcgttctcgcggtagtgcgtccacgaggtgacgagatcgtcgggcacgcagcggaagaccttgcggtagatctcggtctaaggagggaagcgggaagcagcgtcagcatgtaagcgagggctactttgaatcatgacgcgggcggcgcacgttgtgaacggcgagcgagacccaggtgtcgagccagaacttctcgctgagcgggtcctggaggccgtgcggatcaatctgaggcgtcgggagcggcatgctgcagagaagggagtgggtcagcttctgaagcccaattcgaatgagcacaggaagcgggcgcacatccaggggtgcttgctgcccttgcggttgggcggccgggtgttctgaccgccgccggtcgggtccttattctcctggccgggtttgacgtccttgtcggcgggcgaggtcgtgacctcctcctcctggaacgactcgtggtcgtggaccttcttgtcggctccgacgacgagtaaggggctcttggcgttctccttgacctcgtcggcctccttgcggtcgaggacacgggcgacgtcgggcgtgatgctgtcgagcgcgtcctccttgctgatgtcgagcttccggccgtcggccgttgcgtccttgatggcgtcggcaatgtcgccaatgtgtccctcgatctcgtctcgccggagaggctcgtcaatcaggttgtgggcagcgagcttgcgctcctccatcgtcgggacgatcgtcgatgcaaaacccttggccatctgaccgtcgggcagctggaagatctcgacgtcgtcgtcgggctcggtcacctcgtgcgcctggcgcgtgacgaggtcgacgaccttgcgcgtcgttcggttgaccttctgcgtctggccgtggacgacactctggacgaccgagccggcgtgcatcttgagccggtcagcgacggtccggtgctggacgacgccgtccgtctcggcgccctgttcctttgacgggtcccacgtctgaatctgatcctcgcgggcgatcgggtcgcgagcgagcagatcctcgtcctccatcgcatcgacgtcgacgccaatgtgctcttcagtagaacgagatggctcgcggtcagcattagagcggcgacaagccaagggcgagcaaacagacgcacctcgcatgagccggacgcggagcgtgtgggcaaaccgaccgaccttgtacggtttgccggccatcgtcgagtcgatcatgtcggtgtcgcggatgatgctcgcgagctccgagtcgcggtcgccgcgcatgctgcgctcgttgatgttggccgagcctatgatgacgagccggtcgtcgacgatgcacgtcttgccgtggatgtagaccatctcggttgtcaggacgccgctcttgaacttgccccagccgcggagcgaaaagaaggaaatgtagtcgtctgggtcgatgccctcctgccgaagacgcgagaagatcgagttgggcccgcggcagatcgacttgttctggcactcgacaatcagccggaccgacgccgcctggttcgagtcgattggataggtgtagcccgggaagagcgggatgacgatgcaggcccgccacgcggtgccctcttcgtgggccttgatgatccggttgacgagggcgtcgccgatctggttttcaatctcgacgccgtcgacgacagtgctcgtgatgaagaactggttctcaatgtagacaaagtgctccgagagctggatcgccttgaggtaggcgttttggatcgagtgctcgacccggtcggtcgtccccatcgaccacgggccgcacgagcgcgtcacctggatctcgcacgtgcccgtcaggccctgctcctcgagctggcggacggtgaagtcgggcggcggcacgaggaacggcatcgggaccgagtggttctgtcgaaataaaagcatcgtcagggcgggcgagttgacagcgagaaggcgtctgcagaagggacggaccttggtccgaaggaggtggttccagcgctgaataaagtgccggctgaggtcgcgggctggctggccaaccatctgcatggcaacgtcgtgcctagaacacagagatagagcggaatcagcaggcaggtggcggtgaggcaggacgcgacgccgacgtaccagggcatccgggggaccttctcgcggtcgtagacgtcctcgaacggcttgttgagcgtgtgaaagtcaagcacgcgcgggttgctgtaatccttgcccggccagatgggcgcgtcctggccgaggtggacgccggggtcgcagtcgtcgtcgatgaggacgtgctgtggcgtgtcccaccggccaaagcagaggtcgacgccgcccatgaaggccgtcacctcgtcgatgacgcacatcttctcgtggtgcgaccagtagaaggtgccggtcgaaaagtggctcggcgagcgctgaatgtggatgttcgagtgaaggtcgcgcagcgtcttcttcgtgtacctgcgggcggacaaatggggaggggaagagagtcagctcgaggctcttttggaaggctcgctgccgacgcacaggctgtcggtcggcgttgtcttgttcgagacctcgttgtaaacgatgacatagatctgaacgccctcctcggccttctttttgaggatgttgtcgagccgatacttctcctgcgtcggccggcgcatgtagagttctggcgagagccaccagtcgtggatgtagacggtccgcttggcgagcaggagcgcccgcgagaggttccagagatagtcgcgcccgtcgacgagccactgggcggcgacgttgagccggatcggcgcaaacgagtcgaagcggttcttgccggcccagaccgagtcggccgccatcttctcgagcgagacgatgaactgctgcatctggcgctgaaggagggtaagagcgaggcaagggtctcagtggcgggtcgacgaggaaagccggccagccgagcaggacgtacgacgtttttggcgacgagcttgagccggttctgcgagttcttaacgtagaacgtgtggtggctgacattcttgcccgacttggtctcgtcgatcgtcgcccggtcgacgccgtgaatgtcgccctcgagcgcggccagccggttctcctcgccgccgtcgtcctcgcccgtcatgttggcccagtcgtggtcgtgctgaaacttttccgtcttgccgatagtcttgcggagaatccggttcggccgctcgatcgtaaagtcctggtcgaacatgaagacgtcgaagatcttggtctacggccgagggggggggggcggagcggggaggcagcgcgtcagagatgtgagagttgagccgcagctcgggcgacatacctcgtctggatcctcgaccgcgaccatgtagctctcgcggacgatccaccactttggctcgcgctgcttgatctgcgcaaccagccggagcgccggccggtccttcttgagcgagacgtttgtgctcaggacgcggaggtagcccgacttgccctgcgagccgccgcggggcgcgagctggagcgtgagcgacgagagctcgaggaagcggatcaggtgcgacgactcgggccggtacatctggccagtcggcagaaatgcaagagtcagcgctgagactgtgcacaagggagcgcagtgaccgagaactcacgacggcgtgccggacgccgagtaggtaggtctcgagcgcctcacgctggactcgagcaaagtcaccccgggccgcgccagatatatgcccgccgccaccgacctggtgcccgccaccgccaccactgttgctgggcttggccttcttcgccgccgtcaatgcctctgcgaccgtctcgtgctcggccggcccagcgctgctcccgctgccctgctggcggccgctgtagccgtgcccgttcgtgcctcccggtgttgtcggcgactggaggaccgaagagggacgcgagggcgcgcgtgaagggccggcagacttgcctatgccgacgtcgtcgccagagcccgcgttcttcttgcgcttgaagtaggggatgcctgaagggcgggagaggatcgtcgtcagccatagcaacgaatgatcccgtagccacaaatggggacgcactagaccgtggaaactcaggcaggtcgaccttgtcgcggttgttgttccatcggctcctgccggcgacacgcgcaatgccggccgtcttgtagtgggcatggagggcgagaaagtcgcggagcgagcggtaaaggacccatttgacggcgccgtcagcgtacgagcactcgatccggaagacggggtggttcgacaggccgccgatcgagtcggtaatcttgaagctgcggcggagggggaggcaagaacgagtgagtgccagtgaagagggaaggtgagagggaagggcagcgcagcacgcaccggacatagtgcaggaagacgggcacccggcctcggcccttctcgtcgcgctccatgatcatccggatcatgccgacggccatctggcccgtcatgagctcgtcgaccatgttgaggtcgcgcggcttgtccgacccacgctcggccgcccgctcgtcctcctcgcgcgggacggtgacgtttgtcccgagtcgctgaagcttcgacttgagcgtcgaccactttgagccctgctggctcgacgacgtgtcggtccggaccatgccctgctggtgggtcgcggctgcaaggacgttgcgcggcagtgggacgggcggcatcttgggcgagttgtgcggcgagaccggagccgagagcgaacggccgatcgcgcccagtccggccggcgtgccgttttcatgcggctcctgcgagttcatgaagggcgggagcgggtggccgtccgggagctgcgcgtggtgcgctttgtcggccgcttgctcgtctgcctgcgagcggacctgctgcggcggtgcgtccgagtcgtgcgacttggcctttggccggagaagggcgagcagcttgctgttggcgtggtgcttggccgactttgtccggtcgtcggcctcggcgatcggagcgaggctctctggctcgtcgacgatatcgccgttgtggtggccgaccatcgactggaagctcgcgtgccggacgcccttgcctccaccaggaagcacctggaggccgaggaactcctggttcgccgagaagtctcccgccccgcccaagccctcgcgccgcttcgacgcggcgaccgagccgagctcgttcggaaccggtgccgtcaactgaggggcgagcagatcccgcttaacctcctcgaccttgcgggcgtcgagcgccccctcgaagcgccgctcaccggcctggtcgccgtcggcgttcgtcgagctctcgtctggccggccgtctgggacgtgcacggttggcacggccggcgccgtcccgcggttcgtatactctggccggacgctcccatgcctgagctccgggttgaccgacgccggaagcgtgaccgagggcacgatgtcattcgtggcctgcgttaggccgaccgtcgtcgagttcttgtcgttgtcgggcgagcggacgccctgaccgtcgccggccggcgccttcccctcgggcctttgaccagcctcgctcttgtcgtacaacctaggctcgtcgtccttgcttccaccaaagtccttggcggcgagcggcgactcgtccgagggaggcgagccggccgccgtcgtcgatgccgacgagtcccgaccgtcaaggccggcggcggcagaagcgccctgcggcttgaggtcgtagacggtcgggtgctcctgcgcctggaggacgagctcgggcaagcccatgcgtgagcgaaggggcagagcaggccgtgggggaaagcgggcaaggatttgagcctcgagaggcgaggaggagggaggagagtggtggtcgacaggggaggaggaggcgcgttcgaagcgagcgcagagctgggctgaagccaagctgaagcgcgcgctgcgggacctgccttgcgggtgacgtagcgacctcctctgagctcgagtaggaaaccctccctctccgagcccctttcgtgcagagatcgggaggtgctcctatctctatctttagtaggcgttgccttttaaacgagttgcctgccgctgagcgacgccgctcagagagggagacccgctctccgccgcatccaagccctgcggcggcaggcgcgcatgtgcttcgcacgccggccagaggcgtgggaactcacttcaggcgtttcctccgacgccgactcgtcgattgagctcggccgttcgtcgtcgatcagcttcaagccgggccggcaactccatctctcgttagacacaatcggacgcactctctcaatcgacctgcctactctaacctatctgctccaggctctccggccccatgtcgcctgccaagccgtcgagcgcgagcgaccacctcatctcgggcggggcgtccggcctcgcctcgtccgtcgccctccagccgctcgacctgctcaagacgcgcattcagcaggagggcgggacctcaaagtcggtcccttcagcttgagcgcctgcatgaaggctctttcagggcatcgagctagccgtcaggccttgagtcggagggctgacgcacgtccttctttcactccgctgcccgaacctccttccctctgcctcggccacctgctccggctcacctcccgacgatcgatcggctaccctcctcacccatgcgcagaaaggtctgggacgtgactcgaggcgtcgtcgccgacaagggcatcctcggcctctggcgagggactgccccaacgatcctgcggtgcgttccccccttcgccttctcgtcttcctcgacctcatcgcgcgcaggcgctgactctgtcgatcgcactacttgaagcaacgtccctggcgtcgcagtctacttctacacgctctcacagattcgggcgagcctcacgaacgtcgcatatttctcgataccgggtctgccgccagtcaagttaacgacggcagcactaccggcgggcgtccctccgccggcgaagggaggcaagacgacgtcggcattaccgaagctgtctagggaaggtgcgcactcggctgtcggcggtgctactgctgcaggttgcagaccggaggacaggcacttcacggtcaggagctgaccctaatggccgaccactcaggcaacttgttggccggcgccatcgcacgaacgggcgtcggcttcgtgctgaatccagtgacagtgctgaaagcgcggtacgaggtgcgtcccatcgctctcggttgacgatgaggcgctttcatcagccctgacgacttccctgagtcgcccctcggcagagcaatctctacaactacggctccatgtcctcggcctttctctcgatctttcgcgagcagggcctcgctggcctctttcgtggcttcacagcgacggcgattcgtgatgcgccctatgcagggctctacgtgctgttctacgaggaatcgaagatggtcgccggtgcatcttctccctgcagctttggctgcccaaagagttcggagatgctgacgtgctctcaatcgctgccgctagacaagctgctctcgacgaggccagacgccggcatcccgccgaccgtcatccacagcgtctcgggcatcgccgccgcgacgctcgcgacgctctcgacggcgcccgcagactgcatcaaggtgcgtccctccgcgcggacgagaagtctcaacgcgaaaagcacgcagctgacgtttgattgcatcgatggacctcgcgttcaaccagacgaagatgcaggtcctgccagcagagcacaagacgttccgctcgtctgcacgcaccatcttccgagtacgtctccttctcgcccctctcgtcctcctgcccatatgcgccagattcacactccctccccacccgcaggaacacggcttccacggcttcttctcgggcgtctcgctccggatcgtccgcaagggcgcctcgtctgcgatcggctggagcgtctacgagggcttgctgctcgccttcagggagcgcgaagagcggcagcggaaggagagggaagtgtgagacgatctggcatgacagtcgaaagaaccgagcgtgcgctgtcatgcaaggcagagtaggagcgggggccacgtgtgcggactgttgggtccaggtcgacttgctgatcgggtgcagagcccgatgcgcgcccagagttgaccgcctccctctcatctcggcaaaggcgattttgctctgcacaatcactcggttctgatgcccataaaagaaagaggaagagggggaggcccaggaggtgcaagcacgaaggcttttggtgtgcaatatgggggagatacaaggcggctgaagggagcaagggcgcctggtgaaagaggggccgggaaactggccccgaggtgagatggaagaaggggaggagatcgtcgagaagcgagaaggggccgcttcagatcttgacctccttgaggccgtcgcgccagaacgtcaggtagggcgtgacgccgtcctcgcggtagttgagcagcgcgaccatgccctcggggttcatcgactcgcccgtgtagaactcgtagtccttgaagttgccgaggaccttcttggcgacgccggcggcgcgcttctcaaaggccttgacctcctcctccgacttgccggcctcggcgagcgccttcttgagcgtcttcatgtagtccttgaggtagaccatgtacgacttcttgtcgaactgggtcgactgcgggtcgccaaagggaggggcagaatggaaggagtgggtcagtcaacattgcggcttgagacaatcgctcgaggcacggtcaaacgcaaaaaggggagggcgggacgtacctggaggcgcatcgagtagacgacgttgttgaccgactgcgagccctcctcgagctcctcggcggcctcctcggcagaggcgttggctcctgcaggacagatggaaggcagcgttcggtcagccgagccgcgcttagcgagctgaaagcaacgtctcgtccagcgctaatcgcacaagccgccagagaccagcctcaggcggtcggacgagcgcaaaagaactgaccgatgtcgacgtcgccctccttgatggtgatcatctggcagttgacctcgacgacgccctcgtcagactcgatgatatcgtaagcgtccgagaagagctcgtcctgggtgatgactgccgaatgggagagaaatgatggtcagagggggttgcgaggagaggtgggaggggcagaacgtgcgactcactgtcgtctgagggtcgagcaagacaggggtcgagagaggcgtgagcgggcgggcggagcggcggaggcgtcagcgacagccctcggcagcttcggccaaatgagtcaggagcacgcactgaagagaagcatggcgagaagagtgggaagagagaaggagaagaggtagaggaggtttgggcttgggaggtggctagaggatagggagcaggcgcccgagcgtgcgagagcttgccagcccggcagaccagagcggccagtggaaaaccggtttcgcaatgcagatgcaagtcgacgggcggaggctcgccccgccgccgccgcgcaggccgctcgctcgctcgctgcgcctcgccgtccctccgacggctgaggatcggagctcgccgacgggttgcatcctcgctaccccttcctaggcaaagcttcctactgctctcctggccgaaagaaagcgctcgctctcctgctttgacgccctgcctcgcgacgcccctgtcagagattgaccgtcgttgcctttggggcctcggctccctgccctctgcggggctgctcggccggctcgcaggtaaaaggccgagctcatcaatctgtgcggggcatgcagcagggagctcgggcgtgagcacccgggccgagagagaaagagagaggcagagcaggaaagcagagggactcgagcagcgactgctcagcagcgtatgcgcatgaggatgctggcaagggggcttgctcctgctgctcgagggacgcttgcttggtgaaggcgggcgatccgggcccaccggcgctctcggtcggtcggagggttgtctcgcctctctcgtcctgttcgtcggtcgagccgagcgtggccagaggcggacgacgcccccccttccgcccatcagccttcacccacaacccatcccacgcacgctcgcacacaagagagacaaagccgcggacgagcaagcgacggcggcaagcaaaaggcacttccgccccgcctcccttctgcccgtcatgcagcagcagcagcagcagcagcagccctatccagcagggacgaccgccttctacgcccagcacccgccgccgccgccgccgtcgccgctcgcctcctcgtacggcccggccacctcggtcccgtcgacctctaccggccagccttctgcttggcagccgcccttgcttgcctcctcgtcgaccggcggtgccggagcctacccttcgtaccctcccgcagggtccgcgatgcatcatcttcagcagcagcagcagcagcagcagcagcagcatccagcagcatcggccggagcccatccgccgcctcagctgccgtacggcaaccatcagcaggcctatagccaccatccgccgccatcgcccagtcaccactaccagcaccatcagcagcagcagcagcagccaggcctccagccatcgccgaggcacggctcgatcaagcttgagcagccagcaatgctgccagccgttggctcggaccatgcaagcacgccagcgtcctacgacggcggccaccagcggcccgactcgtcgccgggcacacccgacccatcgtcgtcgtccaatgcggctgcggccgcagcagccgaggcggccgacaagaaggagcagcagaagaaggccctccggcgcaacatggcctgccatcagtgtcggcgcaggtccgttggcagctcgtgccctctcgcctgcttatcaagagcagcagacattcggtagcagagagctgaccctcgcgcacatgctcccctgttgcgttgcggcccaacaggaagctcaagtgcgactcactccggccgcagtgcacgccgtgctcgaaagcccggcagtcgttccttgagtcgctcccgccaggaatggaggcgcccgagatgtcgtgtctctgcacgtacgacggtgcggccccgtttcgccctctcgtccggaaaaagagcagctcggctgacgacttcggtcctcctctcgcagagatgaatggtcctttcaagaagagcgcggccgtcccgcctccgcggaagccggcagccattgagccgaagccgtcagccaagcgcgtgcacgaggacgacgaggatgacgaccaaggacgtagtcggcggctcgagtttgtcgagcgggagaatggttcgtcgcgtgctcgagaagggcatcattccttggattctgacgtcttttatctgccccgttcgtagccaagctcaaggcgcagctgaatgagctcaatcatcggttagctcaaggcagtccgcctccgcgagacgcgtacggtcgaggcgacccgtcgtcaacgaccccgcagccatcgaatcagccctacctcggtccgtcggcttctctgctggacgaattttcgcatcatggcatgcgcggatgagctgaccgtctcggacacgctttatgtgtttttcttcagcgccaccgcagtcgtacggctcgtccttcgaaggccccggtctgcacacgccaccctacccgcagccgctgcctgcaccccagcacctctcagcctcctggtcgcaagcgccgcccccaccggcactggcgtcgagctcggcgcactctctcccaccaacgcttccctccctcctccatccgcctccgccgttgccccgacagcggcccgactcgcacctccactaccccttcctcaaccagcagcagcagcaacagtttctcctcccgcccatccagtcgccgctcagcccgagcgacgacttcagcgatagcctgagacatccgttcgaccttcggacaggcgatgtcgtctcgccgctcggcaaccgcgaggccgttatcaagacgctcggcgggctggaagagctagagaagtcgtacgttcgctcgcttgctccaacctggctgcgacggctgctgatcctgagtcaccgcattgtagcatccggcagctgtgcgcgacctcaccgctgatgcggcacgtctggccgcccttcaagccaaagtactctgccggcggatcctcgcccgttcacccgagctcgccgacctcgacaacatcctcatcgacctcgtcgcctgcgtcgccatacacgctgctgagccgccttcacctgccagctacctcgccgatgcggatccacgtctcgctcctgcttgccctctcggccctcgtccaccgcgggacggaaaactcgcaggtctgggcgatcgaggccggccgagagatcatgtttgccaagctggccggcatcagcggcgaggaggagagcgatgcccgtgcacgcgagcgcaaagcggtcgacgtcgtccaggctgctatcctcttgatcgccctccaccactttgagggctcgtgggcagaggtacgtcgaccgagcggcgtttgctgcccggtcagtcgcacgctgacgacttcatttgctcttgcttcgacagttccataatttcgcgccgctggcgagcctcatgagcgacctgctcgggctcgatccgatccacgcgcccgtcttgccagagtactcagtctcggtcctgcgccggccgagtctggcggacgacgtctatgaggagcggcgacggacagtacagtgtggtgcgtgcgcgcgacaagaggcaggtcactcttaggccaaagctgaccctcatccctcgcctcccccaacagcgaaattcgtgcatcacgtctatctcgtcttctcggcccgcggcgcgtgggacgtcggccacgaggtgtcgctgcggcctggcgaggaggtgcgttcgaccctttgcccatcgtcaattttttcagcagggtgacacggctgaccgagccttcctcaacggtagctcacgtcgacgccgatgctgctcaatctgcagtcgatctacctcgtctcacgggtcgaaaagttcaacaagacgctccggccaccaccgccgccgctgccggcgaccgcgagcttgctccagtcgatcgaggaccaggtggcattccagctacttgagagcgacatcgacaactggtgtgtcaagctcggcatgctcgacccggcccgctcagacgtctgggagggcgagtacggcatgggcgagctcctcggcggcaaggtcctcgcagagcagtacgtccccgttttgttttgatcgacgcgctccgatcggctgactgactcctctcttacccctctcctcaactcagcgcccggctccttctctactgtgtccacctgaacaacaactcgaatgactcgcagcggcgggcctgcctcgccgccgctcaatcgatctcgcagagctgcgttgttgcctcgtcgatcccgcccttggccgtgccgtccttctgcttgcgtcagtctctaagcggcctcgccctccgccgtcgtccgcggcgccctgcgctgacctgccctcttgcgactcttctgccaccgatcagactcgtatttcctcgcggcccagattctgctgcgctttctcgcctcggcccagctcaaccacgacgactggctcatcagccagctgacgcagcaggtctcggtcatcaagcacacgtttgagcgtctctcgggctcgtaccgcgtcgcccgcaactttcacaagctgctcgagacagccatgaccgagggctcggccgtcatcccccagagctttgcgatggtcgtgcgtccccttttggctctctttttttccatgcttgggttcggacgccttgctgacttgcgctctccctcacggatctcagttcgacctcgccttttacacgcccaagtagaggcaaatccaataggtcatgccacggtccacacacattctcgccgctcgtcgctgtccctcgttgtatctcattgctcgcacacgacactcatgcaggcatgcacgccaaaggggtgaggttggcaagggattcggcagagaattgccagctagcattgaagctgagaactcgaacaggctattggttgacggcgctcggctggccatcgagggacgagggaagcgcctgccgggctgcttgcgaaaaggattcctgttcgcaatcgcccccggccggagagggcggccacgctacccgcttgaagcacgagcactgagagcgctagtcggctgggcaagcccggagtgttacgtcgcactcccggtcctggcgtcttaggcttcctcagtcaggcagagaaggcgagtgaggtcgtgcgcttgctcagctgcgcgttgacccgcgccgccggagcgcacctggaggcatgcatttgttttccccctatccctttcgacgacggcaaagcgggcagaagttctgatgaagaggttcagagtcttccaagcgttgatcagctgactgcgctcgagaacggggggagcaaacacctacgtcgcagacaggagcaaaccgatgaaggagagtcagtcgcccggctgcgccattgacctgatgaaaatgcaaggaagggaggatcgatcagaagacgctcgctgagatagagggatgttgatcgcaggtatctgacgtacctcagcacaagacgctctcctagatgacccccaccaccaagctggcggcgttgttgttgtgcagccggccagaggcccaaaagagagcctcagcactagcggcaaagcacgcgacgttcaggcgctctccaactcctggggatccatagtcgtggatgtcgccgcacttgaagcaggctccagcaggtgttcaagtggtcaggttagcccggagcatgccaaggacgtccatgacacacgcccgacgagcgacgaatccaacagccgtccggcccccaagaactgtatttcacttcgatggagacgaacaactggacctgcggcgtatacgttgccgtctcgagcaaggctggaagctggagaaagaggacgtccgatgacgagctggagcccaaggtccaactttgctggccgacctcccacgcgacggcgttgagcagcgggggagctttcaagactcttgggccgtccaagaccgggatcgttgcgttggcctccttccggaagggggatgagtcgagcggcggatgagcgagcagctcgcgatggtagcgtgagaggcggccaatcttggtgacgagctgttcgtacgagaggtggctcaggatctcgacccagagctcggacgggagcgtcgggcaaggccgaggggcggcagcagcacgtcgggtggcggagcgggtcttcatggcgggcgagagcggccgccaaccccctccccgcaaagtcggccatcaagagcctcctccaagggaccatccctccgctcagcgccgcccctctcggtttccatcacggcaagcaaccgcgtccgccgtcgaacccgacgaccgacgacctcggcagcgacggctctggcagtcaggcctcaacctcgtccaacccttcgatgcagtcgagcccggcccgggtctcatgggtgcttgaggcggaggacgaggtggtcatcggcgcgggagctcgacgacgtcggactttcgttcggtcactccggcctttcgcggaaagaaaaaggggcgaccttcctggcgcgcgcggcgcttactcccttcttctccctgtcggtccttgccgaacgcctcagtcgggttggagcgtcatatgtagcacaggtaggtcgcacgcggaagtgagagattcgttaagagggaaaggactggctggcgggaggctgagggtccggggcggggagcgatgatacgggcttggagcgggtgcgaagccggggttaagggatgggatggaggtcggcccaagtggccgggcgagtgaaggtgcgctagagagggaggaggtacgaggaacggggtccagtgaagcggagaacgacaagtggcgcgaacagggcgaggcgggcacgacgttgagcgcgctcaccagcggagggcgtactcctcgccgccggcgccgagctccttgccaaagggcccggtgatgccgaggccgatggcaccgccggcaccgccttcgggcatactgccgagcagctggaggcccgtctggtgcacgccgccgggctggcgaggtccctttccgccagcgccgccgttgagcatctggccgaccatggcctggtaagcgagcgtccgctgcgacgaggggatgaacggcgcgacctggggcgagcccatgcccggcggtggtggcggaggaggagcggccggcgacgactgcgaggtgagctggtgggcaaagttgagctgggcggccgagaagtaggggttgacgccgaagcctgtcggcaggcggctgtaggcgccgaggaagggcgacgaggccggactgaagggcgaagcgagcaggtcgggcgtcagactgggaggcgagccgacgaggatatgatgggagaggccttgcgtctgcggcgatccccactggctgttaggcgagtagctgctgtcgctcaggggcgacatgcgcttggcccgagcagcctcctcgcgtacgaccttctgcgcagtgttatcggcgaagcggacgacctgcgaggcatggcgaggagggagtttcggagtttagcgagaacacggaaggcgtcgacagtgaggtcgacgcacgagtggcgagctcgcgccggggagaatctggccgtggagctcgtcgaccttctggtgggcctcctcgcgcgactggaggctaaggaagaggaattctgggtcagtcgtccgccagagacggagagccctcgcgagcagacgtaccggacgagcgcgactcccttgccctcagcgccgccgctatggctctcgagcatcttggacgagacaacgacattggggataaaaaggtgctgccaggaggaagccgagggcaggaggtcagcgtgcgggccgcccggagggcagtggacgaaagactgacctcgagcgcctggtgcaaatagcaggagaagcaatgtcagtgaaaagctaagggcacggccgattgaacgtcgacgcacctcctggctgtagttgggcggcaggctggacaaaggggttggccgtcagtgaggaatgtttcaggtcgacggcgaaccgactcacttcttgacgtagaggttggtctcgtacgggtcggcgagccgctcgagcttctccttgagcgtctcctggaagcgtcgcggcgaggcggtagtcagtccatgtgagcgcaagaggaagggcagccagcaggaaggagacgcacccgggcaaatccgcacttgtagcccttatcggtgaggccgagaatgcatgcttgggcctgggcggctgcagacgggcgaggcggatcagtcgatgccttcgaacgaactgaacagcatggctacgcacctgaagcgagcattatgaagccgtatgacttgccctcgccctccttggggacaaagcgggccgacttgacgaggccgtagggcgagccgagcgacgtcagctgggcctcggtgcacgtcggcgagaggcgcgaaaggaagactgccggcaggtaggcaggggaagggagaggtcggatgagcggctggcgtttcggcagggcagaaggggagagaggcgtcgcacctgtctgcgtcgggacgaccggcgcggcctcgggcgcagaagacgcgcggacgacggcagggtcgcgaggggctggggagaggaaaggcccagtcagcattgcatcgcggcgctgtggaagcaggaggaaggggacggactgaagtcctggacgaaggccggcaagagacgccgctgctgttgaggcgagggctggtggtggtggtcgagcggcgggcccgtgagggagatgatgggctggtggtgctggatcggcggagccggcgtgaagtgggtcgcgtacatcgctgctcaggacgggcgaggggaggggcgataggcgatggaggtggcgagaccgggttggcgggtcgtcgacggaggattaaaggccaggcgagaggctgcgaggggtgcaacgaaggagcaaggctagcgagaggtaggctgtagggcgcgcttgagggccgggtggtgaagctgggggcttagtcgggcagaggagggagaagaggagatgggtgacgggaagaagaagcaagggcgacacttcagcccgccttttcaagccgtcgctgggctgcagagggtggcgcgctcggatcggcaactggcatcggccaccgtggctgagccagtcatgcggagaagagggaggagagaggggggggtcgacgcgtccgaggggacgtgcctcgcgggcgtgcctggagccgccggcgccgcgccggacgcgagagcttgctggctgtgcgaagggtcagcgacagcgaggctgaacgggaaggggatcagtcgagacgagggtcgggaaggcaagaagcaagctagcgttgaaaagggtgagggttgagggttgctggcggtcggcgtcatcgcggggtgccttgtcgaagccgacgcgtctcgcacagccggcgaccccacttcaaacgcgcagtgttaacggcgcatggcgataagtaattagacgagggcattgtcgcggggaagcagatgggacggatccaggacgggcgggtcgaggtgcgcagtgacggaggcgctttgaggagggtgcgaggggatgcttagctgaagtgaaggagaacgggaagaccgggcagtggtccgctgcatctactgctggtcgctaccgaggaagccgagaatcgcttgcagctgagaggtgtgacagcagggagacgatcagccggaggcgacgagcaatcggaacccagtccgacgactcacgtttgccggctgcgctgccggtcccgctaccgccgccggcgcgccatcgtcgaccttgacgtacgcccagtacgcgccattgaccttctcggtccggacgacgcgcggcgccgtcgcctggctggcgacgaccagcggcgcggtcccgcgcgcgaggcggccgtgcgtcggcggctgagaggagctcgccgatgaggagcgggcgccgcggccgcggagcgtgttgggctcgtggcgttcctctgaaagaaaggttgtaggcagggtcagtgccgctctgaacgaggacagaggccaaacgggacgcaccgagttcttcgcgttgccgctcagccttggtcttccgggcctgcgagatgctgaacggctcggtcatgctctcgtccttacagagtctcttgatgtactcggactgccggtggtactgcagcgcggacgaacgacaggtaagcgaggcgggcgcggcgcggaaagttggacggcgagaggacgaacgtcgtttgcgaaaccgcggtacaggacctgccactttaaggccttgcagccgagcgccttgtagacgtccttgaggtcgtcgacgtgctcggcagcctgacgaggcggcaagttgggggtcgtcagcacgagcggcgcacgccaccgcgccctgggaagcgcacctttgcatctgcgctcgacagcctcgcttcgccctttgcgtcggcagtgccggtcgacgaccgctgccgtcgctgccgtcgccttccaccaaagcctccgtcatcctcaccgctcacgctcctctccgaacgatagtcggtggcgctatcgttgtcccgttcctcttcgctcgccgcctcctcctccgacgacgaacgagcgcgcctcgcgcatctttttggatggactaccagccgccgacgggcgcttcttcgccggaggcggcctgcgctggcggcttgacgagatggcggatgcgggcgaggacggcagggggcgttcgacgcctgcgctatgaccaggaggggcggcgcgcgggctcccggtagcggaggccgggagggctctacgggtcccgagaatcggcagcacgcggtcgcggccggcggcggtcgcggtcgacgaggcgagcgggtcgggtcgagcctgtttcggaggagggctagaggaagtggctgggacggccgatgcggctcgggcaggcgagggttggccgcctgtgctcgggacgggtgtcgcgccggggcttgttgccgagagcggctgggcggagagctaaacgaccggttaagagagcgaggcaggacgtcagcgacggattcgcaagagaggaggtgcggcggactcgcgtcgcgcgcgcgcgcgaacggcggctcaggggaagcagcctgccgctcttgctgaggaacggcggacgcacgaggttaagctggggcgatggtccgctggacgccgtcgtacttgtcagccgacgcgttggccggctcctcgggctcgatctggtccggattcgattggagcaagggcgacgagtgtcggatcagccttcgcgtcgaggacgaggaagctccgtgaccgccgccccacctgcaagtacgcgatcgtcgcgtccttcaacctcgccttccacggcgcgccgtcaaagctcctatcgttgagcccgagctcatgggcgaccccccaccggagggcttcgacgtcacctgtggccgctcggaccggacaaaggacgagatgacgcgcgggatgagggcggtcgcgcggacgaggttgggctcggtcgattccatggtgtcggtcggccgggcgggcgtcgagcggaagttaggcgacagacgtattcgggcgaagaaggagcggtgctggagaggagtagacaggagagcgaaagtgaaggggcgagagagggacgagagggaaagcggaaagggttacggtagagggaaggaggaggctggccgaacgaggttgcgacaaaatggccggtcgacgagcacttcgtcccttcctcaactggacgcccgtacaagggatatcggagcgccttttggcaagagtggtcgctcgcacacggacggcgggcgagcgaaaggagatcgaccatcggaatccagctcagcccgaacgccagttcagtcttcatcgtcgacgaccccttccagctcgaccgtctctggaaaccacccccagtcgttcagcttaacccgaccgagctcgcccggccggccagtgacctcgacgccctccgcctcgagcgcctcgcgctgccgctcggcgccgggcccgccgtcgccgcgggacgagatttggccggtcgaggagaggacgcgttgccaggggacagtttcgtcctggaggtgcttgagggctgcgggcgaggcaaggcgaaaaggaagagtcggctcttgtgatggtaagggcctagatgagacgagggagcgtggcgcaccctggccgaccatgcgcgagtaggtcgggtgcccggcgagcttcgcaatatgtcctgctcagcagcaacggaggatcagttcggggctgaagcagcagccctaaccaaggctggaatcgccctcaccgtacgacgtcaccctgccctcggggatggcgcgcacgatctgagcggcggccgccgtgtcgaacggagggtcggtcagcaggcgagaggggtcaggaagggtcagcgactgtaggccgtcggtcggtcaggcgccgggcagacggacggcatagacccgctcgtggaactctgccaggtcgatggccatccgaggccagagatgaggttgatgggtggaggagcgtcgtccgggcgtaagcggggcaagggggagagaatcaagtatcgaatcaacaatggccgccgagccctctcgtccctcgctgctgctgctgctcaccccgacgcatcctcctccaagcctcgaccctccctccgtttctctactttcgcagccatgttccgctcgctcgcccgcgtcgccaccccggccttccggtcgaccgcctttgtcgccccgcgcgccgccttccgcccggccgccacgctcggtctgtcccgcccgtgcctctgcctcccttgcccaaccctgcgccgggccgtcatccttgtccgaggctgacaccttgcccctccgccgaccacgctaggcatgcgcttctcgtcgcacgagagcgaaacctacgacgagttcaacgcccgctaccaggagttcttcaacaacgcccccgacctgtttgaggtgcaggtgcgtcggcctcccttccctctcccctggtctcttctttcggctcgcccagggtcgccttcaggagacaggtgctcgctgcctcgaagcgagctgcgccctcttgggacggccgttcgctcggtggctcggtgcgcctgggccgaggaggatagaggcgagggagcaagcgctgctcgcgtcactcttcgcggaccttcccataggccgggcgccgcctcgagctcgacgtcctgcctgcaaatgtgccgccgagtcttagggccgatggggcgtcctgctaggctattgtagttgctagccttgtcgcccagcaggggagatcacctggaccgagcagggcaggcgaggccagccgccgctgcagctggcatcgcctgcctacacacccccgccgtcgctcagtccgcctttcgccgaacgccccagctaatccacccgcccacactcttctcctcagcgtggtatgaacaactgcttcgcctacgacctcgtcccgaccgtcgaggtgattgaggccatgatgcgcgccgcccggcgctgcaacgacttcccgacggccgtccgcgcgatcgagggcgtcaaggtcaaggttgagaagccgagccagtacgaggcttacctcaaggagcttgcgccgctgatgcaggagctcggtgcgtgcctttgctcgcctttggaggcggatgagacggcgaccgaacgcggaggctgacgattgcttcccccttttgccgctcgtccaggcgtccccacccgcgaggacctcttccactaaacgcttgcgtttcgggagacgggaagagggctcatacgggagggttgctcggcgcagggcttgcgtccaggcgacggagaggccagcgcacacggaggatgggtgcgtggcgcgcgtgagagcgtgaacgattgccgcagaggggagaggggcagaacagatgaatcaagaagcatatcgctcgcccaaagcaacgaacgtgccggtgtcgagctgggagggagggcgggctgtggtgccctccagggctaacccgttgcccttctgcagccgacgtctcctacgagctgcagccgcctggcctcacatcgctgtttctgatcgagttccgtgagtggccccccttatcttgcatcttctttcttcgccgcttgctcgctcgctcgcgcctttgacagcttgtctccgggtcggcctcggacgaaggcggcggacgaaggcggacgacgggcccaagatggtggccgatgagttgctcggcaacggaatggggtcgaaggcgccatctttcggccaagtgcgaaaggggccagagctcctcgacccggctccctccatccgacggcgcgtgacgctcggccgtcggcatcgataagatcagcctgccgaagcggagagatgcaacccgacctaccctggctggactgtagaggatgaatgaggcggacgaggcgagcgagggaagttgctgaagctcagaggcgctggcagctcggcatgtcgtcgagggcgctgcatcgctcgccctcagccaagccgacgcgcccgatgacgatctgactccctgcccaactggtcgagtaaacagcgagcaacaaggcaacgtcggagccgtacctcaggtaggcgaggccaccatggctgacggtcgagcggccgcaaggaggccaggagaggaagacaggcgcctgcttcgccctgccgcgctccccaaaggggaacggccgagcaggggtgtgacgaagaagaagggttgtcggccccgtttagtgctcaccacctcctggtttcgttcctcgctctcgcgagcgagaaaaggggaggtaggcgagcgtggacgaggcctcgctgcgatcccccgaggcggtcctcaaagccgcatgaagcgaccgagattcgcccttgcccccccaagggagggcgccgagggaaaccggggggagtgtctagttcctgatccccagacgtggctctcccactatagctgttaggccgatcctcatgagcctctcccgagggagaggaggatagcctaggcaaagcctgtggtgtgttgagaaggaggagaggggtggaccggcaagaacgtcctcgggccagagagaacctctctagacggccaagcgcaacgtcgtctcgagctcatggaggaggaagaggatgatggtagtcggtagggaggacggagcttcgaaactcggacctttcaacggcgacgctcgaaaacgcaaggcaattgaaactccgcctgccacgccccgcgcgcgtctctccgcacgagagcctggccccgcccgccgtctgctggccgtcaccgacgaccatccgagcgaccctcctcctcctcctccccccttcccttgctctactttctccctcgtactatacgcatacagctactaccaaaccccgatgggcaatccgtgcgttttctgtggatcactatgtgccgttcggtagggcggaggctgacgagccgcgccacccccgccccgcctcgttcgcacgcagcacgccgtcgtacgcgcccgacctgctggcgaccaagctgctcgccctcgtcgagagctcgttcgacaaactcctcgacagcgagagccgcgacgggccggagccgacgaagcgcgagcggcgcgaggccttccgggcgatggccgagggctttaccgggagcgagcctcggatgcgcgccctcatcgattcgatcgtccgggtccgtcctgccacctggccctcttgctctcttcggcgcgctgttgtcactgccacccatgctgacaatctgcacgccggacttgacagatcgcacacaagaacagcagctaccggcgtgagtcggcctcgaacccgaagccgtgcgcctgtgccgactgccaaagctcggcccaccggtcgtcgcttcgtcggcagaacgccgtctcgctccgccggcggcagctgacgaacgatccgacgacggccgggtcgtctttcggcgacgatggctcctcggctgggccgtcgtcgtcgccgccgccaaacgccgcggccggtccgtcgacggcctcgtcgcggctgtcgggcctccctgcgccgtcggccgacaacacgctcgccgccctcctctcgcggcacattgcccgtgccggtcgggcagacccgcccgtcgactgggagatggcgtccgagtactctgactcggactcggacggcgagacaatcgacgacagccagccgctgccgccgctgccaggcaacgtcccgtacggcgccgcgagcgccatgaacgcccggatgtcggctgcgctctctgccctccgtcaggcccggtcacgccacgaccagagcctcagtgactttgaggcctcggcgaggatggctgctgcgatcgacccaacccccccgccaccgctgcgcaaccggacgccctatgcctcgccgcctggaccgctcgcgcttccgcttccgcatcctcagggaggtctgtggaacttctcgcccaggtcccgctcgccgacgctctactcgccctcggccgctgaagccgacgccgacggctggatctcggtcggcagcagccagctccagcagcagcagctcggactcgcctcgccgccaccgtcgtcgaccgcttcgggctcgcgcacaaaccggagcagccgtcacctcccgcgccacgagggcccgtcgctcgccgggctcgccgcggccgcgacggcagaggacgcggccgatgcgcatctcctcgacacgctccacctcggcttccagcccgtgagcccaccgcggtccgggtcgtcgaccgccgccgccgctgcagtcccgccggtcgattgggaggcgctcgaagtcggcctcacggtcgacatgctcgacgctgcggcggggaggcgggcgtcgcgtcgcagggcagaggaggagggcgtctgggccgacgagccggagcgacgccggacgcccgctccggccgctgctgcgagctttctcgaagccgatcgcagtgctggcgctgcgccataggccatccacagcatttgtcaatgtcattcgattctgttacagtccgagagacgaggaaggcgattggagtgccagctgcgcagcgaggctgccggaggaagggccctctgagccctatcagctgcacgtcgatccttctggacgcacgagctgtcgatgcctgctcttggctgttcctctgcgttgttttccaaagcagcctctcgcctctggtcaggatcctcattgacctcagcttcctgctgctcgtcgtcgctcgccggttccaaaactcccgtcgcgccgcctcttctcgacctctcaaccacaacccgcccctcctcccttcgccgcccctctagacgcccagactgcccaagatggccggagagtgtacgtctgctcgttctggtccaagccgaggcctcagctcgacctgaagcgagggtctggctgtcaaggaagccatctctcgtctccagcgctgatcaccccgccgccccctttgtcttgccctcgtccggcccgtcgtcttcctccgctgttgcctctcccggaaacgctcggctgcctacccggacggaaacagcccgctcagagctcatcgcatggacgaacgacctgctccagatcaactacacgaagattgagcagttcggcagcggcgccgcttactgtcaggtgcgtcctcgcctgccgcaactcccgagctgcctgaagcttggtccttgccttcgccgacctgggcttgcaggcagaagacctgtcgcttctctgcttgaaagagctggcgagcacatggctgacatgcgcacacgctctctccttccagatccttgactcgatattcggttcgtcacagcgtttcgcagcggctgcttgcgctccgagctcgagcttcaggcctgtcaggcagctctctcattgacgagctgccggcggccagctgctatggagcaagagctggcgcttgtcctctggaaagtttcgggacgcgttgctaatgagccttcgtcctggttcctcgtcgtcgttccctgccaggtgatgtcccgatgtcgcgagtcaacttcggcgcgcggcaggagtacgagtacctcaacaacttcaaggtgctccagaagacattcaaggaccacaaggtcgacaaggtgcgcgccgctcgccttctctccagatcagcgtcgcatcgcgtcacgtgctgactccgtccggacgtcgtccttcccctcacccgcagccgatcccggtcgaccggctcgtgaagtgcaagatgcaggacaatctcgagtttacgcagtggatccggcgcttccacgaccagtgctacggtggcgggcattacgacgctgtcggccggcggaaaggcgcgccagcgacagtcgctcctgctccctcgagtgcaggcgccggctcagctcggctcgccggcagcggcggtcctcgggggaagacgtcgcttggtggtgttgggggcggactccggcctgggtcctcgatggcgagtgcggccaacctcgagaagatccaccagctgacggacgagctcaacgaggtgcgcgagcacgtcgccgggctcgagacggagcgcgacttctactttgccaaggtgagctcgtcggccagtctccgtggccaagagggctgcctcgctgacgacgccctttgtccagctgcgcgacatcgaggtgatcgtccaggagaagctcacggaccccagcgcgctcgagcccgaaaaggtcacgctgctcaagatccaggagatcctctattcgacggaggttcgtcgctctccctcacagcaccgcatcagcctcggccggcacagtgtgctgaccgacgtctccctttttgccgctccaggagggcttcgaggtgccggacgcggacctgccatccgagcagctggcgtcgacaagcatacaggacgtcgacgagacgttctagagacgactcgtctcgtgccgccccacgctgtcccatcttcacgctgctcgcttttccctcgctctcccctttcctccagccgctgctcggtcatacccccttctcgctggatcccaagacaccctgtcgtccgccgtcattcacgagcgctggcccgacaacaaggaacagaggggcatgaggatcgtaaagagagaccaagcagacaggcagagagagagagagagagaaaagcgggtgcgcgctcagcgcaggggagcgccaccgatggaggtcgatgaccgcttccgaacgacgtcgccgtcgaccttgcccgacgagcgagctggggcccgatactctctcgacgatgccttctggacgtcgtgaacaggctggagcatccgaccggcccggacgcgctcgtaagcggccttgagggcttgcttcgtctcgagctcgcgcgaccagcgttgggccgatttgcttcagacgtggaacaggaacggatcgtcagcaactgtcgattcgagctttctcgagccgagcgatctgttgataacgcacctagcccggacggtcatgaggacggcgatggcgacagactttaacgatcgccgcttgggagcgaccagcgcgtgcgggtagcccagctgagcgatggcggcgtaaacacgcgcttgcctagagggacgaggatgggtcagacctcgtgtgagggcgtcaaagagggcagcaacatgaactgactgccgggagagctggccgatgagaatcaggaggtactccttctggagcgaaaggtcggcccggaacgtcgtctcgcgcgagatgaccgccttgaggtgcttgacctcggtgaagatgccgagcgtctccttgcggtgcttggccttctgcgcgtccagactgcggggccggaagatgcaatgatggtcagcaagcgcttctgatcgctggcagattgcccacagctggaagagacgcactcggcgtacgcatcctggagggctccgcggatctgacggttctcctcgtcgtcgcggcggctgtcagaccgcagggcagcctcctcccgcttgtgcgagtgcttgatctcctcttcaagcgacttgacgtcgcgccgcgtgcgaagcaggtcctgctggaggtcggcgatctcgcgcagcgtgccctcgcggctgaccgactcgcgagcgccctccgcctgcgttcgccgaagctggtcgatctggagcgcctgcgaggtcagctccgagcggagcgtgccgttggtcgtccgagccgtgtcaagctcggtcgaaagtgattgagtgcgctacaggagcacgagcgagtcaggtcggcgtgcgcgagacagagctaacgaccgtcacgactcacccgctgcaagtccttcaggtcctgcgccgcacgcgtaacctgtgcctcaagctgagatcgcgcctgcttgagcgtctcgagctcccgcgcgtcctgccgggagcctccgtcggtctgggcgcgggttcctggtgaagagacgcaagctgttgtcagaggagttgaaagggagaccggtcgggtcccagactcacggtcaagcatctgctggagccgctcaacgtgatcctcggcgtcttgaaggtcgcgcttgcacgactcgtagtcctggagtagtgacgacgtcagcagctagacccatcagccgctcagaagaaagacgtaccctcgtggccgctcggacttcctcctgcagcgtcgagttgtctcgcttgaactcggacagctcatcgcgcgccgcatcgaggtcctgtttagaagaggttgtatgagccccggcttgcatgaagcctgcaaacgggctaccttaagccgtcacgcacctgactgagatccttgacgtcggcttggagcgacgccttcgcccgctccgaccgggcctgatcgagcgaggagctgcgctcgctttgtcgaagcttggcaagctggtcctggagcgctacgatttcgtctttggcatctgacagctggcgcgaaagggtgatctggtccgagccggcattctttaaccggtcgacgccgtcgtcgacgagctcgttgaggtcgtcgagctgctgccgcagacgagcaacctcggcaagcatcggcgagtcggaaggagcgcccggcgtctgctcaagccagggcatctgctccaggttgcagcggctgttagtccagcttctcatctcgcgcaaagccagcgaaaagtcgtaccttgcgcagaggcccgaccgactttggcgtccggactgacatgatggtctggttggcgaccgaggtgttgaacgaggcgtgcgagccgagtgagagcttccgcgactgacgccggaggaccgagaactgcgagtcgatgttggattggtgcgactcgaggacctggatgcgcaggtcgcgtgcctcgatcgcagcgcgcttgtacggcgagcacgcgaggtcggcctgaaggcggccaatctcgacgtgcgcggcatgcagctgctcgtgaaggtcttcgacgaccgggtcaaccttgccggccggtgtgccaaaggagagcggcgaccggctccgggcgcgaggcgtctgtttaggcgaaggggcgcgctcgacctcctctcgcagtgtcgccagggcgtgagagtcctgagcggcttggctgcgggcatcgtgcagctgatcctcgaggagccgaagccggtcgccgtaggcctgctgagccttgatgagtgcgtccgagtgcgcggcttcgagctgcgcttgcttgcccgactgcgactcctgcaggcggacagaggctgcaagcttgtcgccgaggtcgagcagctgcgaccgaagctcgtctacttcctctgcgagggcttcttcctgggcctggtgggcctcaagcgactcgacgtgtgccgcaagctcgtcctgagcggcgaggagggcgtcggccttgtcggcagactcgtcgcgcagccgctggctttcggcgatcgattcggcgagtgcgtccttggcctggacaagtgccgtccgcgcctcggcaaggctggccgagcgctcgtccagttggcgcgagagatccgcagtgcgatgctcggcctcaagtcttgccgaagagagctcgacttcgagacccttgatgcgatcggcctcgttgccggcggtgtcggaccggctcaggcgctcaacgagagcctcttgctcggcgatggtgtgctgagccgcctgcccttccgcctcgagggccgcgatgcgcgccatagccgagtcgagcgaagttgccgcttggtctcgcgcctcctcgaacgccttctggacggcggccacctggtcggtctcggccgccagctgagcgagcgcgtcctccttctcgcgagttgcgtcctcgacctcggtctggttcgacttgaggatctcctcgatgtccgattcgagctgctggagtttttgggtgtgcgcctcggcctgccgggcgagctcggccttgagagcgacgagcgcgtcctccgacatctgagcctcttgggtgcgctcctccagctcggtccgcagacgagcgacttcggcaccgcgagcgccaccgtcgccatcgccatcgacacttgtgttggccgtccggtcgcctgtcgtcgtgtgggcgtttgactcgtgctgctgcgtaatgacgtcaacctgatcgcgcaagacacgcagctcttcgtcgagcccctgcaaacgccggagctcctcctcctgcccggcgcgctcgaccgcatccgcctcggccgtttgccgaagcgcatagagctcctcctcactctcttcgagcgcacgctggagctcggccgagcggacctcgtcgggcgcagacgtcgaagtgtcgtcagcgttggcgtcgagtcgctcgagtcgccgtcgcaggtcgtcgttttcggcctcgagctggtcgcgctcgtcttggagggtcgtgttgcgcaggtggagctgggtgttgaggttgtgtagatgcttgtggatcttgatcccgccctgcttcggcgtcgcttcggacagaggtagcgacgtgttggctcggtgcaggttggtgaggtcctcagccgactcgaccgacaggaccgacgtgttgccgtcgtcgaccgtcagctggccgagcgagatgagcgactcgttgtagctctgaccgcgcgacggcgacgcctgctgcagcgacagaaccatcgacggctggtgggcgccgacgaacgacgaggaccggcgcgtgtgaggtgtgccccgcatcttgggccgcgaggccgaggcgagagctgcgagggcgacgttcttacgaagctcgagcgcggccgatggtttcggcgtcgacagagggcctcgtggcggcgcagacgaggacggagagggcgtcccgtagttggactctgggatgggaacagagaagtcacggaacgtcctcgtctgcggcgcatcgagcgagtcggtcgtcaggtcggccacctcgtgcggcgccggctcctcgtccgactcgatcgattggtcctggacctggaaagagtcgcgccgggctgaggcctgcgacatgccgtttggcgtcgccgcgcttgactcggagacgcttgaggtcgaggcaggcgagtgctggagcggcggcagcgtggtgcggttggaccgtcgccggctcaggttgataaacgtcgacctcatctggtcggccgcgaggaggtagagcatagtcagcggagaggaagcaacagcagggtcgcagagcagactaacctcgggactcgacagctcctgctgtgccctcgagtcggcagagttgtcttcggacccctcgcgatagtcatcccttgcggccgccttgcgctcgacgtcctctcgggacgcatcctccgccgccgccgcctcctcctcttcctcctcctcctcctcctcctcttggacgaggctcagctcctggctggtgagccgcgaaatggaagcggatccgggcgtcccaaagtcgacgggcatgtcgaagctcctctcgagtgatggcatgtcgacgtacggcaggtcgccgctgtcgttggcagacgcagcgccgctcaggtttccgccactgtggtcggccgcctcggcttgcaaccggcctgtaaggtcgacatcctggaactcattctctggtgcttccggcagaatcgagaaggacctgtcatcggcggtgtccccggccggcggcggcggcggcgaggggggaggcggaggcacttgttggcgaggcgcgaacgagtcctggtcggcctcgcgctcgtcgtcgtcgggcgcaaagtcaaacgagtcgggtccgcccgatatgcgcgagtggatggcgggcgtgttgaagctgtcgccgccatcgcgagagtcgtcggcggcctggttccacgggcccgacagggcaaagcgtgtgcgcgagctcgtcgtcgagtctgggtcgctgcgaggagtcgagtaggcgccgctgcctccgctccggaggattgacagccgcgactgagaggcagcaaaggacacatgcggcgtcgatgtgagcggtgtcgagatggatgcgaggctcagctggggcgagtggaaggacgtgctcgagagcggggtgacgggttgcggagtcgtcgctgcgggcggtcgggcggctgccggtgttgtcgccgtcgaggtcgcagctgccgagccgggatacgagccgggcgtcgaagacaggatctgagagatggataggttgccctgttgatgcagctaagacgggtcgccaggtcaaacggccggcgcagagtcagcttggaggttgcgtggagggtgagagccgagcgagagcacgaggagcggacgcaccgagcgcgaaagctcagagagcatcgagtcgccctcgctgtcgtgcgggtacatggatgggagcgtcgggagctccattgattgttcgtcccttaagctaccggaagcagggaagacctgagggtcagctcctcatgcggcggatgcgggagcttgaggagggcagggcgagctgcgtctacgaaccgaatgggcgtctcgtggaaggacgccatcgtgcggcgattctcctaagctgggtcttgttcgcgcgggggtacaaggctatgtgaagaggggggtacagacagggctcgagcggtcgaaggcgggaggtgacggtgagagtcgagtgttggtcgacgcgtcgcgcggcagccggcgtcgaaaacaaggcgcgtctgacgtggccggccgttgcttcgcctcctccagctccagccagctttcagacagacgagcaaaggtcgggcaggcatcgatacgatgagataggattccaaatgagattgtcggaaaagacgatatatgggatgaagtcgaggggagcggcgggcaggcaggctcacgagcagcaaagagggagtagacttgagggcaggggtggaaaggaaggaggagctgatattaagcgcttagcacttctgccactgtagtgtcgaagaacggtccgcaagggcggtcagtgcgagtccaaacgcttctaagagcccaaggcaacgcaccatcttgaagttcttgatggccaggccgcgctccttggggtcctcgggccacgtcttgtaccacttgtcggtcgcgttgtaaaactgggagggtgaagagaggtcagcgaaagagcggaggcgagactgcaggacgacgaggacgcacgtcaaagggagcggtcggcgaggtgtcgacccagggcttgtttccaacgccgtccgggaaccagccgttggtgccaccgacggcgacgtccatcatcaggtagaaggctgtcaataggatgatggctgtcagcgactgtagaggaggtgaaccgaggagagcgcgcgagaaagacgacgcacgccggtcaaagggcgcagagttgttgtcgctcttgagccaggggttctggagcgtgatctgctcggacgcattctggacaacggcggggaagtcgccgcggtcccagaagctcttgcccttgtacttgatgttgaagacctggttgacacgcgagtcgatgtctgtatacggcagaaggcgagtcagcgggggcaggctgcgtcgacgacgaggaaaaagatgcgcgacggacaggtcatcatgtagtcctcggtccactccatgccgaacgtgcggaagccctcgttgtagtagcgccgacgttgttgctgcaaggtgaagcagtgtcagatccatgtcaatcgctcacggcggcagccgactgagagagagactcacgttccagccgaacgtccagtaggtccggtcgagcgccttgagagggccccagtggagggcagaggtgacgtagttgacgccctgcgacgggtacttggcgtcgttgccgcggccggtgatgatctggaaggcaggcgaagagagtcagttctcagtgtcgcccgtcgccgagagccggaagcatgcgggacgtacgtcaatctcgccagagataggccaagggccgtagtagtcctcggtcggcagcatccagatcgaaggccagatccagtcgccggtcggcatctttgcctgaaactcgaccttgccgtagcgaatgctgtggctgagcttggtcgtcaggcgggccgactggaccggcgggatgatgacgcccatcgacgagttggaggtgatgacacagttggggcccgtcttgttggaggccgtgcaggcctcaccgaggtcgagcgtgtagccgttgaggagccggtcgctaccgagctcgtcctgggtgagcgtcgggacgaggtacatcgtgttgtccgcgacaaacgagttcttctcggcggtcgtcgcccactcgaattcgccgctcctgagagagcgaaaagcagaagcgtcagtcgctgtggagggagggaggcagcacctcggacggagcacgcactggaagccgttgaactggttctcgcgctgccagaggtcggtgttaaacgtgctgaagtcgtcctcgacaacgaggcagagcttgcccgggttgggcacaccgcggtagccatcccagcagactgcagatgagggcgaaggatgtcagcgacagagtgagacagcgagggcagccagacgagagggactgacggacgccggcacaggccaagccgaggatgagcgagccgatgatgatccaccgcgcccagcgctgggccgggtcgggcttctcgagccagggcttgtaaacctcgcccttgagtcgggtgctgacaaacgccttgcggttcgtcgtcgtcttggccgacatgaacgaccgctggccgagcgtccggccagagcgcgtcgactgggcatagttgcggtgggccgcccggccgttcgacataccagaggcgcccgacatgccactcatatacgagcccgcaaacgagccgacgatcgacggcgtccggttcgtgacgaccggcgtccggccggccggcatcgggttggcgttgcgagcgctgaacgactcgttacgctgcgtccggccggcggcggcggcgacggtcggcgcgaggtggccgtcatcgtccgggacctcgcggccctcgtcaaagtattcttcgtcgtcttcctcgtcccggtgctcatcgagctcctcgacctgatcaccgagcatcgacccaggccgctcatcctggtgcgagcgccggatcgggcgggcaaagctgctgcgctgctggacctcgccagcaccgtcctcgccaaagggctgctcgtaggcggcatcgcccggaggcgtcaccgagaaggacggattgtgcgggttctggtcgtcaaacgggttcaggcgagactgcctgaagatgttgtccgacatcgcgcgcgaagaggttgggggggttgagggagcgaacctagtgaagaggagggggagatgcttgcgggcggactgggtgcgagaagggagaaagacgagaaggtcgaaccagcgacctgcggagagggcgagacagggtgagaagcggtggtggttgatggggcgggagagagagggagaggaaacgagaaggacggcagggcaagctcgcgcgctgaaacgcccttcgcagcgtaagacaggcgcgcgaggcctcggccgccgaacccaaatccggcgcagcggagaatcgcgtctaggctctcgtccaaaactcgatcgcagagcacagtttgtcgagcaggccagcagcatggtgggccccgtgcgtgcgtgccgttcgttcgttcgttcgctcgtcgctcgtcgagggaaaggcaagacggcacgcaggcgtctctccccttcccttcgctcaaggcacatccttccccccccccggtcagcccttcctcggcctcggttggcagggccgaggggacgatgacgctagcctgtgccaaccccttcctccctggtcgagtgcgcaaagcggcgactgcaagcgttcgtctatagcacatcctggccctcgatgaccgtctcgccgtctgggctgaacttgacgtcggtctaggtcgagacgagggtgcgctgaggcgtcagcagaaatcagtcgcaaagggttagacgagccggcgcacctctgggttggccgcccgactgatgaactttgtgtggtctgcgacagacaggcgcgatcttacatcagccagccgtcggttcaatcgagagagaacgacctctgcgttcaacaggacgcacggccaaaggcaacgattctattgcggctatctgtcagctccacacgcgtaaagccgagcgtcttgccaaccgagagaacttcgcctcgaatctttatctcgtcgccctccttgccggccgctcggacaaaggtcgagccaatgtcggtcgagacgccagagaagtgcatgctgctccgggtccacagacgcagtcagcaaggtcgcttcgaggcactgcagcgcgagttgcgcacccatgcgacgacagcgccagagagcccatcgtgtctgaggggaggaggagatcagcctctgcgtgcgccaggcacaggaactcaatcttaaatcttaagaagccccacctatcacgctgcagatcgcgccgccatgcaaggtgttgccacggttaactgacgaacggtcggttggtacgtcagtgcgagctgcaagcgctgcgcagcgccgagcgaatggcccgtaaaaggacaacctcacgccaagctacgagtagagctggacgtactgcattctggccggatgacgagtgtcgcttcaacaagtcctggtcgggcggcgacaattttgagctgttgagaaggagggaggcgtcatgtgacggaggatcagctccgagctcgagttgctagccggcagcaagtcgctgaaggcagacgaacgttcggcagggtgttgaagtcatggctacgcagaggcacgagggaggtcagcgacagccgcggacagagtcagcggtcgaccgcggacactgacccacggaacgagaagtggtggtcgaggacctgaggcaggccggcggacgagggcggaggtcgggcagcaacgttcgcggcgtcagctcagcagctgcaggcgattagctggcaagggcgcactctccgggtgaagcgcaagcaggcagccatcggggctgagaaaggaggtgaagaaggcttgaggctgaggtcgagcgagattgtggtcggctgagcagaaggcgagctgcgcctccggccgacgtgtcgggcacgcgtcacaaagtcgctcgtgtaggtccggactaacgcaggcgccagctttcgagagcatcggcacgacaactctcaagcacccagtgcacgtacgtacagcgagctgttcgcgaacgacgggcgcatgggctacaagcgtcgtcgaccctcccctcgcaggccgtccgcccggccgcagaccggcctcccccttaaacggcttgcaaaaaacctttgagaatttcggtcaagaggctcaattgcagggaactactgagctccggggacgacacgtccaccccgtccggcaccccgggggcggtgctcctgggcggcgtacgacgagatgggggccgagacgacaaccgggatcgagtccatgccgagcgaacggagaaggtccttggtgtcggggtcgacctcgaggccagactcggggacggcgatggccgagacctcgggaacgtactggtccttgcgctcacgctcctcctcctgcagcttgaacgagatgccgcggacggggcccttctggatgcgcttcatcaggtgggtggtgaagccagcaatcttgttccgaaggcgcttcgaggggatgatggcaacctcgtcggcgatccgcttgttggtgctggaagaggagtgcgcaggagggtcgaacgggtcagcccgggcagcacaaggcacgggcgagcgtccgagcgagtgaacgcaggagcacaacgcactggaagtcaagggtgagccgagggtagaacttctcgatcatcacacgcgaagcgcgcttgacagtcttggtgcgaacgcgtccctgaaggtggcgcagaggacacgcaggtcagtacgcggctcggccgggactggagggtcgagttgcgcgtgcagcagcacaactgatggcgctggggcctgcatgggttcgcccaggacagctaagctgagccaagcgacgtcctggaacagccggcgagcggtacggctggccagtgccatgcctggagcgaggagcaggcctctcaggccggccgacccgctgtcgctcgtccgctccccggcagccgagcaggcccccgctgcggcgagctgcagcacccagtgccaaccgctcgaccacgcccctgcctcccgcacccccctggacgtcgtcaggccgtcagggcctgggctcccgatcggcaaaaggccggcggcgcgaggtcgtgttgacgactctgcagagctcggcctcgagcacgacctcgtggagcccaagtcgacgtcgtcccaggcacgaccagggtccgagtggggtccattcggacggcgtcgtcgtacttgctgctgctgctgcaacaagaaggttcgtgctggacttgccattttgagctagcttgattgatcttgacggcgaaggtgcgacgaagagacgagggaagcaggagcaggagccaggccgggacgcgggacgagctcggcgcgcccgccgcgcgcgcgcgaggctgcgggccgcggtggttaggggcattttcccagaattccgtcgccagaagggaagcaaaagcccaattatttttgttcgttaagggtcggttcaaagccgattcaagactgactgaatgaagtcaggcacacgaggacgatccagagcggcaggagcaccggaggcggcatgtgtgggcgtctgagcccaagtgaaggcacaggactcgtaatgacacttggtgagagacgggcacggagaggcggcagcgtcctcggcccgcgcgcgagcgtcgaagcgcggagcgacgtaccactgaggactttcgtagccaatacccactgaccaaacctctgagttactaggaggagctactcgtattgtccacgatgagctcgattatgttaggtctcactgctgcgagaacaaatgctcagacagcaggtcgtcctccgcacgcctccggttctgccaaggaaaacagccgggcatacgtcgtagcgacaagagatgatctgaagcatagcgcatcgcaccctgatcaagttcagtagggcatggcgtgtctgtcgtgtaagaagctcgtccaagtgcaccctccttcgtgcgtactgacgaaacgacgacgacacgcgcagtcgcccggcttcgctcggccggctctcgtgcctttacccggtcccgtcctcccgaactaccatctcaatcatcatcactgactgcggcagatgacctcgctcgagacggtcccgcatcagctggcaactctctcgcacgaccagctccggccctttgcccgctccctcctccaacccgctcccggcgcatctcccagcgccaacgccgccggcttgtcgcccgcagcggcccacctcgccgccctcgaggaggccgtcgcactcggcgtcgacctcaagctcgtcgcgctctcagccagcacttcctggctccccttcaggagctcacgcaagcagcagctcgcggcgtggttgcgcgagctgctcagcgtgcttgccgtcgaaggagagcctgccggagctcggcccgacgaccatgcagcacggatcgccgctctcgccggcctgtatcgcggcctcagggcggccaaggcagacagcaacctcgttcgtgacgccgagatcgaggcggccgtcgctgtcgaagttgttctcgaggctgtctcgcgcgggcgtcgcaagggcaaaggcaaggctccagccgaaggagatggtgcttgaccgacccgaccctaggccgacctgaagcgacatgagctgatcactccaattcactctgaacagacgaccccgcacccgtgctgtatgctgccgcctcgctgctacctcgtctgccggtgtcctccgtccgggccctcagcaccaacgtcagcagcctcgcccgtaactcaccgcgcagcactactgaccccacgtcgcccgccctgccagactctgatcgagctcgccgtcggctcagtcgggcctcagagttcgcccgatgacctcaggcgcctctcggcgatcattgtcgtctcgctccgggcgctgtcgaccgacctcctgcactcgaaccacgttcgctcagcctgcgagatgctcgcggcgcgtctcgccgtcctctcgcccgggtcaaggccgctcgatgacaaggcaggcagcctttttctcgactttatcgcacccgtcacctctgtcctcgccgatatcctcgtcgcctacccgctgcccccggcgacgatccgacggacctcgcacgcgctcctcgtcgttttgtggcgctgggcgccgacgcttgaccaggccggcggcttcgaggctctctttgaggtcggccggacgtggtggacgctcctcgacgtcctgatgagcgatttctggtcggccgacgagcggtcgacgctcttgcgcgagctctcgcaacacgcggaggagacaggtgagtctacacttgtcgtggtgcaggtcgcatcgactcgacctgacgcacgggctgatccagatgatgcagacctcgcacgtacgaacgccatgctcgtcgttgccgagcaggtgatcggaggctcgaccctggacgcgatcctgcccgtcctttcggctgatgtcgtgccgatctgcaatcggtacgtcgccaaatgcttcacgttgcgactcctttgctgacgaaccccgtgcgcttgcagctacctcgacgacaacgctcggctcgacgtattcgagtcggcgcactcggctgttcttgcgatcctcagccggccgctgcacctctccgcaaaaaagcggccttcgccggccgtcgagacgtttgtcggcagtttggtcgacagctatctggctgttctgttgcgggtgcgtctcgcgctgtggccggcgtcgcggctctcccgctcatgcgctctctctcccactcagaatgccgaccggcaccagctgtcggacgaccagctccagcacgccgcgcggaccctcgtccggcgggccggcgacctatcttctgcatcggccactaccgtgctcgacgtcctgcaggcgcaagcggaacggcctagcaaggacggcgccgacagccagacttacctcggcctctttgcctccgtcctgccggcggtgcccgtcttgcacctgccggcgtatctcgcttcgctcgagcggctcatccggtcgaggacggccgcaacatcgttagagagggccgcgctcgtcgccctcgtctggggcggtatctctgccggtcttggggatgaggccaagctcgtcggggtcgagtggtggctcgccttccaggcgcggctcgaacaatcgggcgcggatgaggcaagcccggtcaaggccaagctgtagtaccctcgatgatggtcatgccgcactctcagctcccaagctgtcatgaggcacggtggcatctatttctgagggcagctctactatggccgggggtcgttacaaggcgtaaggagggaagacagggaaacgaggggaagggagaacccggccccccgggaagcaggggctacctgccgaccaggcggcgctcgaggacgcgtgcgaccgggtaaacgacgccagcgaatgcggcggcgagctcaaagccaatatcgccgccaaagggggcctcgccgaccttgatgccgatcgggccgacgtaccaggcttgcgacatgcccatcgcggcgccgacggcaccggcagcaaaggcggcgagggcggcccagccaacgggcagctgcttggggtcgttccacgtctcggcggcgcgataactcttgaacgagccgcggcggaagataaagtgctcttcgaggacgaccgtgacaaagagggcgagccagtagccgaggacaagcatgaagttgtcgatcgaggtcgcaaagctctttgcgccgacgatagcgaccggaatgtaaatgcccgtgcagacgacaggccagacgatccgcgggatccgggcgatccaggcgccgacgaccgagatcgagaggccgagcgagtagacgttgatgatgttgttggcgacgaccgagatgacgagccagaagagaaagaagccgccgccgccgttgccgaggacgggcttgaggacggcgccgagcaaaccgccgagctcctcggtctcgtaggccgtgttccagagcccagtcgggtcggcgacagcgccgcacatgatggccgcgccgagccattcgacgaggacgagcgggaagatcaggccggcgtacgtccaggcaaatgtcgaccaggacggcgtgctcgccggccggtagatgttgtagtcgctcgcgagcgagatccagcccgaggcaaagccaaagacggtcgcaatgaacgagagggcgccgccgatcgcggccgtgccggtggccatcgggacgttgaccatgcccttggcgccgcagccgaggaggacctgcgtgagggaaagtcaggtcagtatgtgacggccgctagggcagggatgagaacgactcacgacgaaggtgatggctgtcggaatccacgaccacttttcgtaaatgtggacccacttgtagcccatgaggccgacgacgagcgtgatgagtgcaatgacgacgacaccgacggcatgcgagatgcgctcattggcgacgacacggagcgtctgggctccggcaatcgtgttgaccgacgaccagccaacgcaagcgatgcagttgagaagcgcgacaatcttcgagaacggggtcaggggtcagttgacgcgcacgccttgagcggctgagcagtcgctgcgcaccttggcgccatgccagccccacgagtagctgtggcagaaccgagcgagtcagcatgagacgataagagtcaggacctcgggagcgcgagcacacaccgagcgctcgtcatttggcggaggccgagggctgggccaaaggtcgccatgtaggccggcagcatggcggtgaacacgttggtgagaaagatgatgagcattgagtcgcctggatgtgcgataagggaaggttccgggtcagcatactgggccgggccgaagctcaagataggcggcggcgggcgaaggggacgcaccgaggccgaggccaaagagctttggcccgagaatgccgataccgaacgtcgacagaacgcagttggcggcgagccagacgaaggtgccgcccgagggcttgtgatcggtccgcgagtcttcatcaacgcgttcgataccgcgggtctccatgccaatcctaaacggggggcgggtcaagaggtcgttgtcagcacctcgccggcgactttagtagagcagctttagcggagggagcgacggactttgcctcgagcctggccgacgcagcattgatgcggtcgagcgagccgaggaagcggccgtacgtcgtattcgggtacgcgaccgaggtggcagcacctgagcaagagtcaagggtggtcagctcggggaggtcgcgtgcctgcacgcgccagccggcgggcaggcgtttaaatgggctggaggggaggaggacgcactgagcgtctcgggcgtctggatctcctttggcttctccgggtcgggctgctcgacgttggccatggctgctgcggcttcggctcgagagggagaaggcgagggttgggtccggaagtcggaggagagagagagagggtgggctgaatggaggctggtgaaggtcggagggcagacgctcgaggaaaaccgccgaccgccgctccgacggcaaagcccgactgcatttgccgaagccggcttcgtccttcagcccatgccgcccatgcccttatcgttaacgacgtcacgagccaggtcagtcgagatacggggcgcacgtcgaaaggtggtggtttgaggagggtgccgtccttgctgtcacatgcccccgccctgccttgctcgcacaaggttcccgagtgtccggagcagcgtccgtcgaccaggtcgcccgaccaggccggaggtcgtccgggcctgccccgaccggcggaggagcgaccgcccgcagagacacctcattcgcccgaccgcttgctgtcgtctgccatgtcgtccgagatgaagggttcatgcaatttatgcccgttccttgaacaaaacgacggcggagagagccggcagctcgaactgcagtgggtcgaaagggacaggggccgtcagggggcgagttcagcttgcgaagggcgacaagggggacggacgcactcctgcgagctcgaagaggtcccgctcacgtccgccagggacggtcgcgagcacgagccggaagtgggctttcgccacccagtcggtcgggaggtcaccggctccgacggtgacagcgtcggtaaggccaaagttgaagaggaagaggtggtcggaccgggtaaagacgatgagtgctcgggcctgcgcattcgccgaaggagagccgggggaagaggatcagcaagtgtagcatacgacaaccaggtcgagagacagacatcgtcctgcgttgagacgtcggcgagccggcccgagccccagccgcccagccgctcggcgttgagcatcgcccggtcaaacgcgtgcaggtcgaggtagcgcagctcgtactctgggttaatcaggttccactgtcgtcggcagtggtccgacttgaagtcgttcgagaccgaggggaacacgagccactgcaggaagggccaggtcaagggtcagggtcgaagttggggaagggaagggctcgacggccgcacctctgggtggccgaactagcggaatggggaggaacaacggccggtcagtgctgccacgcgactctacctgcctgcatgactgcttctagacggacctcattacccataaagtctgggagcaacgacgggcgcaacgtcagtcaagccgcttggaaatgaaacgctgcggcgacgactcgggagctcactgaggtagccctcgccggcaaaggcaagcgtcatgagccggagcagcttgtgcagcgccatccccctttcgacggagagtaaagaagggggaccgtcagtctttataagacgatgctgggcgccgcctcgaacaggcgtacctcgcgacacgctcggtcggccgctgcgccaggctcatgttgtcgtagatgtcggtgtcaaacagccactgggccgccgtcttgccgccttcgatgcactcgtcatctgaagcgcagtatacgagagggtcagcagagccgagcggggcacgagtgagactgcggtggagggagggcgcacggctctcaacgaagccgatgctcttctcgccgagctgcgtccggcgattgccgagcgtggcgacgatgcgccggaccggccagttaccgcctttcgagtgtccgtcgagaaggttgaaccctgtgtgaagcgaagcgtcagcaagacgggcggcagagcaagcggtgcgacggaggcctcacagagatgcgggttgccgagtgcgagtcggtagtcgaagccgaggccgccgatcgcggtcgggaggcacagcgtcgggaagcccgcaaagtcttcggcgatagtcatcgagaacgggaagagcgtcgactgtaggggagtagagggtcagcagaagatcgtcgagagacctgcactggctcgagtggagacgtacgagcatgtggttggcctgagggtataagggaggtcagttgagtctcagcgtacagcgcgatcgtttgacaagggataacgcacgagcatgaggtattcgacgccagtgtgatcctgagagagcaggcgtcagtaactcgactcccaccggtcgtctgcctacctgagctaaccgctcgacgcaccgtctctgacgagaagtactcgccatagtcgcccgtgaagcgccggtcgatcgcgtggtgcgagaagagcatcgacgagaccgagtcgaagcgaaagccgtcgaagccgagccggtcgacgcaaaagtggaggttggagctgacgagcaggggtgggccgtcagcggcagcggctaccgggtgcagacaggcaggcgggcgagacttacaggaggtaacggatgacctcgatgttctcgtagtcgaagacgcggctgtcggtgcgtggcgcgatcaggtcagcgcttgatgcctggtgcagtcagctgaggctgaagacccacgttccccagactggatgcgacccgttcggtccctcccgaaagtacatgccgtccgtgccgttaaaactagaagcagaagacccttcgtcagcatctgactctgtggcgtgaggcaacggacgcaccggtttaggctctccgtgtcgttcgcgcacgagtggctgtggacgacgtcgaggatgacgcgaatgccgaggtcgtgcgcagcgtctatgagcgagatgagcgacgcttgcgagcctggaggaaggcgaggcaggggcgcatcagtctggcggctgttgggtctgcaaaagcgtcgcccaggctgaccaaagcgcgacgagacggcatagtaggagctgtgcgggcggctctgcatcagctactgatctgtgacgacgattcaaacaggtggctgggctcacgagacttggtagccatacgaggcgtagtacgggtgctccataacgcccatcctgcaaagatgagcatccggtcaggaagggcgacaaaagaaatagaaacgccgggcgaaggcaaaactgacagctgtagagtgttgtagccgccctccttgaccctccagaggacgttgtgctcgaactcggcgaacgtgccgaccgcgtctggatcctcggtcgctgcgccgatgtgcgcctcgtagatcctgcgcagtcgacagaccgcaggcgtcagtgtatgaccgccaaacagataagagcggcagggtgggaccaactttggcgtttggggctttggcggccggacgccgcggtagacgggtgggagtgcctccatccgggcgcggaaggcgtactcttcgggcgcgttctgcgtcgcgcggagcgtgtaggccgggaagcgctcgagcgtctcgccagacgaggtcgtcactctgatctgcaaaatcgggacgaataggctatggtcagcgagggaaagggcggggcgtgggcagcgaccagttgcaccttgacctcagacccgagcgggatgggcagctccccacctgcgagcgccgggacgtggcacgtccagtagacggccgagccagtcgtgctcgacgaggcgacgagcggattttcccctaagctgaagccgtctgcgatggaatgtagcgagctagaggtcagcggaagcgcagccgacccgccggtcgaggtgcgtcaaagggaggggatcgcactgaagtcgccgacgagcgaggcgctcgtgatgccctcgacccactcagtgtaggtgatcgagttgtccttgttgatctgggcaagggacgagggtcgagggttaggccacagctggcagagcgaggcagagacaagaacgcacgacgaggcccatctgggtgtaggccgtacagaagccctcgagaccgccgtgcgcaggcttgctgagccgctcgagcgtcgcctgaaagtgcgcatacctggaggagcactcggaagactatggtcagctgctggcagccaggatcgacgagcgagaggcggtcgaccgacctagccttgaggtaccagtcccatttggcgagtgacgggtcccaagcgacgacgccggagccatcctcgggctcgccccgctgggtcgcgacgaccttgccctttgaccgcatcgactgccagaccgatttcttgggccggccgagcagctcgccgccgaaccagaccatcggccgcttgtacgacggctcaagtgctgccggcggcttgccgttgatgggcgagctcggcttgggcgacgacggcgaggctggcgaggagctcatgactgatgaggtaggcgaggtgctggtcggacttgcaggaggttccccagagagagagagaggctcgactggatccagtgacaggcaaagaggcgctgccgagggcaagggtacaggggaggtcgtcgtcgtcgtcggaggggcttattgacagggcagcggacgggccgcgcagcaaccggcgtcgattggtggggctgacgagagagatggccggtgaccctggtcgtccccaggcctcctcctcttgcccaccaaccacgactctcatcgcacgcctgctcgtcctacgatctctagcgacgctcctcgccaacgccctgcttcaaaagcggaacattcaacaagagtctccatcacctccggccttctccggccagccctctccccgcccccttccctccgacctcgctcgccgtcgttctatctctcgacagtcgtgactccccgagcccagttcctcatgtcgatcagcaagctctccgacgcctgccagcaccttttcacggcaaagtctgcatcaggcctgtaaatccgggtccctcgcccgatcaatctgatcaggagttgatctgcgctcctttcttgctcggaattgcaggacctttgagcaactcggctccaagatcggacgggacgaggtctgggttggcgccctcttctacggccaggcgaaagcagacaaagaggatctgaccaagctggccaaggtgcgagcggcgaggttccgcgaccgctcctgtggacgaccggcctgacatctcacggctgttgcaggccctcaacctcgagcttggagcagtctcgagccttctgcacgagtacccgatgcgagggtgcgttcctgcctgctgagcaattggcgttaccgccaagccctgttttgctcgtcctcccggctgcctccgtcacgcgatccctccgtcgtcctcaaaggagaaggagatagtggcgactggcctgagcgtacgggtgaggacctaatcgttctgatccgtgctgaccatcgacctgacccgacagccaactctgggagtcccctcccaaggaccccctcctctaccggtgcgctcctcatacctcctgcactcgacctcgcagctgcagactgactactctgaattgatcacgcccacagcctgtacgagatgatcgtcgtctactcgctgccgatcaaggccatcattcatgagaaatttggcgacgggatcatgtcggccatcgactttcgcgcctcagtcgagagtcagaccccttccccgcttcacctctgcaagcctggttggctaacggtcattcctcttgtctgtgcagaggtcgaggacccggccggcgaccgcgtcaagatcacgttcgacggcaagttcttgccgtaccgaaagtggtagaccccccgggtgcgtctgcatggcgtctgcgaccctgtctcaccaaccaatgcttcttctcctgctgacttgcgatcctctcgggtcgttcaggcgacttactgcctcgaagcgcaaagccctatgcgctcgccaaatcgtcttcgtttccgacccatgacgtacatggatttatctctcgctctcgtcccatcctgctcgctgtaaacatgtctttgtcgccctgcgccctagccgtcatttattggtcgccacgcggaggcgggcgattcgatgcagaatgacttttgggagacgcgccgagcgagcgagcgcgagccgaagcgatccgccctcctccatcttccgaccaacgacgaccctccgctttgcacctcctcgaccggctctgccagaggcagctctccatcaagcgctttcctctcacaggacctctcgattcctccgagctcgctcgctcgctggcccggcatgtttcccttctcgctcctcagcggcctccgctggaccgacgcgctcgtcctcgtcctcgtcgtcgtcggctcgctctttgtctaccgctttcatatcgccccgagcctgacgtcgtacgccaacctgcctggcccggagccggtcagctacctctggggcaatatgcaggccctgatctcgtacgtcgggccttctctgcgcgaaggcgggggagctcgaaccgtccctcggaggacgcgtcgtgctcttcccgctcgaagcttccgcttcccgccctcgcctctcccgcctcgcatcgcgtcgcctagcagcagaggcggccaggacctctagtgctgacaaggcctgcctttatactcttagtcaggagcctggagtcggccatgagagcctcgtcctcaagtacgggaagacgctgcgcttccagggcttcctcggtgtgcgtcggtcgtcctcgcctggtgcccgccccggttgactgacaggctgcctcccttcattttcattcgctcatctagggccagcgcttctacaccgccgacccgcgcgccatcagccagtgcgttcgcgactcgaccgcgccgggacgggagactgctgctgacgacgctcacccgctcactcacagcgtccttggcgagggctatgactacccgaagcccgcgcgggtcattacgatgctcgagaccatcatgggacagggcctgctgacgactgagggtgcgttctaccgccgctcacaggttgccgagctccgaggctgacgtttcttcatctgtcttcctatcccgactccttcccgaaggcgacatgcacaagaagcaggtgcggcctcttgctcggtcttcgttccctcgagcaggaactgactttcactttcctccgacaccccttcagcgcaaggtcatcgtcccggccttctcacgcgagcatattcgcgacctgacgccgctcttcatggagcacgcctacgaggtgcggccgccctgctcagcccacgaacctcttgcgcaacgctgacacccattctcatctccgcctacagctcaaggacaagatgcagtcgctgatcgaggacgacaagccgacgcggatggacgtcctccactggatcggccgctgcacgctcgacgtcattggccgggcaggtccgtcgtccctctctgccgcccgctctcattgctcgtctcgccctgaccgtctcttgcgcgcgatctcggcaggcttcgactacaacttcaacgcgctcaagcaggaccatgacgagctctccgactcgttccaggaaatgtttgcctacgggtccgacatcaacctcctccttatcctccaatcgtacattccgttcttcaagatcttcgtacgtcgtcgcccccgagggaggctggagcggtgagaacgcgcgctgaccgaatgctgcaccttcgatctcgcagccgacccggcagtcgcgcgcggccaaggcggcgctcgtcaagatggagacgatcggcacggtccgtcccgtcctctccgaactcacttcctgccgacgctcactcgctcgcctttgcgccgtgaagaaactcatcgaggcgaagaagcaggccgtcatggagtcagtcaaggacaacgccggcatcgtcgacgagggcgacatcgcggtcggcaagaaggacctcgtcggcaaggacgtcctgagtagcctgagtgggtccttcggtccaggtgagagccgtgccagagagcgggagtgctaacgatacgctgctactcgcgcctggcagtccgctcaaacatggcgcacgatcttaagcccgaggcccggctgagcgacaaggaggtcatcggccagatcagcacctttgtgcgtgatttatgctgcaccttgccccgttatcgcggaaggctgacagctctcttcctacgctctcgcagatgctcgccggacaggagacgtctgcgtgattcgccccttcctgcgcgacgcctctcgtctggggtcccttcgactgacgcactctctttcgtgcagcactgccctcgcctgggcaatctacgccctctgcgagaacaccgagatccaggacaagctccgggccgagctggttgcgtgcccgaccgacgacccgagcatgtgcgtcctgtcgttgcggccttacggcgacctctcccggctgaccatctcgctgaatgcatcagggacgagctcaacgccctgccctacctcgacgccgtcatccgcgagacgatgcggctccacgcgccggtcccgtcgacgatccgcgtcgccggcaaggacgacctgctgcccctatcggagcccatcatcaacacgcgcgatggaaagccgatgacggcggtgccgatcgcaaagggaacgtcggtctacatccgtaagtcgccccattcgttttcaggaaggagtcggccagaggctaattgctctgccgccttcgctcgctcgcagcgattctcaacctcaacacgctcgacgagctctggggcaacgacggcaaggtcttccggtctgtcctggctccttgattacttctacttgcgcatcggctgacccgagagagccttgcgtgtttgcagccccgagcggtggatgggcgaggagttccccgaggcggccaagggcgtcccgggcgtgtggacgcacatgtcgacgttcctgagcgggccgcggtcgtgcatgtcggtccctctgtcctccagacacgccgttcgcgagaagctgacgcgtccttttctctcgtcgattcagtggctaccgctttgctctcgccgagtccgtccacctcttcttctctccgctcaaacgacacctcctgctgaccgtacgtcgtccttcagggtcaaggccatcatgtttgtcctcctccggtccttcgttttcacgcatctggccgagcggccaaactttatcaagaagctcgcgttgtgcgtctgcctgcgcgcctgcgcgcctgcgcagagggagcgaagtgctaaccttctcttcctcggcgcagcctcatcgtccggccgcggatcaagggcgaggaggacgtcggcgctcagctgccgctgctcgtcaagccttaccgaccgtgaaagtgggcgtctgtgtcttgtcgtagaagagtcggtgtggtgcaggcgggccctgtgcgtgccggccgaaaaggggggcccaaatcgtgtctctcgccaggctgggccggtcgtttacttaaaattcgtccgatttctcgtatcgtcatgtccggtcccgtgctgcccgctgtgtcggaagagagtctctgcctgaaagtgggcggccgtacgcatcgacggctcgtcggccggcgtgcgagtcgaaggccgacgattcccgccgcctgcctctggcccccctccgaccgtcacctccttcctccgttgagtgggttgggttggtgggcgggaggagagagggagagagagggcgaatgagagaaagagggcaggagagcaggaggtcggcctggcctcttgtaggcctcgagaacggagggcgagcgagcgagcgcaagggtcccgcatcgaccgggcgaggcggcgagcgcaggtgagagggcgaggacgaggtcaggcggtcagtaggcagtcagcccaggccaagactgtcgtgcgcgccgctggacgacgcccttcacgctccctgcgcagaggcgagctcgctagtctatcccgcgtcgtccggcttaacgtccagacggtgagctggtggcgctcccgtatcgaccgggactcggcacgccggccgtgttgccttcacgcaaggtggagctccggccgctcttgcgctgatgacgacgagcagcacgccggatccggtgccagtcggacgtgcatcgaggttgcgagtagaagattgagagagctgcaagggctgcgacgacctgccagagaggtgctgcagcaggtagacggctggcgacgccgttcgtcaagcgccgtgaggcgaggctagggtcgggcagggccaggagagggggcctcggtcgaccggccgagctcaaggcgtcggtgattgtaggctcagcagtcgcgatcagcctcctccagaccgacagcctggtatgcctgagtcgtgtcgggtcagcgagcctgtaggggaggtcgtcgtcgacggccaagggagcagcttcgacgcgacgaaacggtgctgatctgcccttgaatgaccatctgccaatcgcagcacgacgcccacgacgcttcccgacaacctgaacgagaaactcgcgaaagggacatggcatggtgcaaagaagacttctgcacaaccctcgctgcctttcacaggtccatcccgacgagcaccttgtcggcgctgacggtccagcgctcacccaccaccgccgttgtagcatcgggtgcaaggtcgaccgacggcaaaggcggcgacttgagtccgcctcctggccggcgctgctgctgctggcgccggccgctggccgagggcgaacccgagcccgaggtcgtagccgaaggaacgagcgtgccgccgatgagcaggaggccgtgcaggagctcgcgcaggtcgggcgaggccttgtcgaggacgaggacgagccgtgcgagcgagaggcattcagacgcgaggtccatctgttgcgagagcgggcaagaagcaaattggagtcagccgagtgcggcagagaaggagtcaagaggggcggcactgacaatcatctcgacgccctcgcggatgtcgacgccggcgccggtcgggacagcgacgcagaggacgagctcgtcgccggtcgccgcgccgctcttaagcgcgtcagccgacgtgagcgctatcgcctttgccgcctcgggctcgagcagcgcgccggcccagaccgagccgtcgcggaggctgacgacctcgagctcggtgctctgcgcgcgggcgcgggccgcctgcgcccggtcgggtaggaggctgtcgaagaagccgggagcgagcgacgacgggaagaaggacggtcggtcgcgcgcggctgcgctgagggccgaagcagccggcggcgtcgaatcgggcgtcaaaggcggtgcggcggcagtgtgaaggaacgagctggcgaggtcgaggtgggcgaccggctgcgtcggggacgtgttcgagagcgggggcgacaggagtgggatctggaccgcgagcgacatcgagtgggacgcgccggcggcggacggaatggggtacgaggagctggtggcggacgagctggaaggcttggcagcgaggatgggggaggtggtggcgggggaaggaggttcggcgcaatcgtctctctcacagacaggttgcgaccactggacaggaagaagaggatcgttgtcagcagagatcgggcgtgccgagggttgtagtaggggcgaggacgcactccgggtggatggcatttcgggccatcggcctcaaacccaagacttaggcccgccgccgctgctggcgcggtagttgaaggtgctgccgccgacgtgggcgaccgccgccaggccggcagaggcgagcttgaggtccctgttcccgacgctggccagagcggcgctaccagaaagagagagagagggatgttcagcgtggaacgtgcgagaggcgagatgcgagcggcggcggggggacggacgcagggccgagactaaggagattcgcggtggtattctgattggcgtgcatggcgggcgagcagactggggtgtgtcggctgggtacgagggtggttgggtagtcgcggaagagcagggctggctgggttggctgagtagagtcggtcgtgtctgagggaggagagcgagcgagcaagaccgactgactggtggaggcgcgcttcgacgctcgggcccagactccggcggattcccagcctcgccccgggccaacattttcgcccgcaggcggccggccgcgcgcgctgccctgcccacgcaaggctgcccgttttcgcttcgactcgtccttctccccttcaagccatcaagccagcaggtcgccccgactccgagacctactcttcttccgccaaccacccttttcaaacctacaaaaacaatgtctactgacgccgctgctcgtggacgtggaggcttcggtccgtcgtgcctgcttgctcggtcgtgcgaccttgttgaagctgacctcgtcgtccttctctctctcaggccgtggaggtgccggcgcccgtggtggccgtggtgacacccgtggtcgccgtggcccccgccgtggtggccgcaaggacgaggacaaggagtggtgcgtctcctgttctgccttctcgcgtgcctcgcctgagttgtcgactgaccctttcttgcctcttcagggtccccgttaccaagctcggccggctcgtcaaggacggcaagatcaagtcgatggaggagatctacctcttctcgctccccgtcaaggagttccagatcgtcgacttcttcctccccaccatcaaggacgaggtgatgtgcattgcccccgtccagaagcagacttcggccggccagcgcacgcgcttcaaggcctgcgtcgccgtcggtgacttcgacggccacgtcggccttggtgtcaagtgctccaaggaggttgccggcgccattcgcggcgccatcatcgccgccaagctcgccatcatccccgtccggcgcggctactggggctcgcacattgctgagcctcacactatcccgatgaaggtctcgggcaagtgcggctccgtcatgtgccgtctcatcccggctcctcgtggtaccggcatcgtcgccgccccggcctcgaagcgcctcctccagatggccggcgtccaggactgctacacccagtccaagggcagcaccgccaccacctccaacttcatgaaggccacctttgtcgccctcgccaagtcgtaccagatccttacccccgagctctggcgcgagattgcccccggccagacgccttacgaccaggtgcgccacgcctgcttgctgagtcgtctttgcgccagaagcgattgctgacttttgcccctccttctcttcaactcctgaccactccgcctctccttcaactttgccactccttttcaaccttgtctctcgttcccaaagcattccgctcatctcgcggtctcggcccgcaagacctactaggcgacttcattttgacggacaaaatcacgccgtggccctccggcaagatttcgtcctatgaagtttcacaaggggaggtgtcagggttggcgaagcccgtgtggctgcacatgagcgcgagggtcaagggggaggcatttgtttgccttccgcctgctgccttcgagcgagtgtctgcccgcaggcggtcagatctgctagccatgatgctttgttctctatcttcctctgatggtcgagttgggcgcgcggggtgggaggtatgagaacgcagtatgactacgagcgggcaggggcatgagtgcgtgcgggtagagaggtatgagctgacgggaaggcggtggtgaggtgagttggcgataattgacagggcaggtaggagtgtgcgcgcaggacgtgcgagcgcagcgcgaggtgtgagtacgcagataaacggcagctcacatcaagcgccccaagcacctgagcgacgatcacatgtcggattgcacatcccgtgcagatcccctttctcgctcgcgttcatcagtgtgtagtacgaggcgccgtggcctggctgtcgtcgtcgtcgtcggacgccggggtctcctttccgcgcgcgcgagactggtgcggacgagagcggcccgaggcgaagcgaggctgagctcactgccttgctctcaccatcaccctcaccttgcttcactcgacctctgctcactcgtcgttcccgcctccttagaggcctacagccctcagcctccctcaagctcgatcctcctccgcaacgatggttgctggcgctgcgagccgcctcctgccttggctgctcctcttcgcgccgatctccaccaccgccgcctctgctgccgccgcacccgagcgcaaccgctcatcctcgtcctcgctcaagttcttcggcaagaacgctgccgccgggtcggcgaggaacggcgctcaggctccgatcagcgtttggagctcgggttggggcgtggacgacgtgcgtctgctagcgccctcactctggcttccctgcctgctcaggagatctctgacgggctgaccactttcctttctacgcatctactctcctcacctgctgctacctggtggcgcacaatccagctcgcgattccaggtgtgtctctagatcaattgttctcgaccgacaggacgtcgaagctgattgcctctcgctccccccgcccactccaggccgtggaggcaacggcgacaaggacgactgcgagtgcttcaattgccttctgcccaagttctcctgcggtcaggtgcgtcagcggcgggccacggccatcatgagcgccagtcctctgacggattcactgatatcggctcgcgtccctcggcagttcggcgagtgcaaccagtttgacggccagtgcaagtgcccggccggatttggcggcctcgactgccttactcctcgtgcgtcgggttgctctgctacgacattcagccctttgtgctgcgcgctgacatccttcctcgtcgctcgcggctcagtctgcgactcgctctcggacggcgcgaaccgccatcagcgtaaagcgggcgagctctgcgagtgcaacgagggctggggcggcatcaactgcaacagtggttccattcctgcttgcagtgtgcttggctcgggccagtttgaggctgaagccgtctctctaccctgcagcctgccagacagaccaatcgtgcgctaacttccgcctccccggatgggagggctcgctcgcggccggtgacgacgatgcgatccctggcgacaacatgacgtgctacaagggcggcgacgccgttgtccagaacttccagatgtgcgacgtcacgagtgcgtcgtcctggctctgcgggtccgagaggcaaagcaactgacggttggcgacctcgccctcagacccggctatcattcgcgagctcggcaagaagaagccgcaggtgaccttctcatgctcggccggcccagccgctggtaatcagggaacgcttggccgctcgacgaagggcgacgacgacgacgacgacagcgcaggcagcaagacgtgcgcattccagttttggattgagcaggtcgagtcgttctactgtgccttgtccgagtgcgactggcaaacgagaagcacgtacgacgccaacgtcaccgagtacagctgccagaagatcgagtgcgactgcgtccccggccgcatgctctgcggcgaggacggcagcgtcagtgagtagctgagctggcacactctctcgcgccgtgcgccactgatcacttgctttgcctgtcgccacaagacatcgacgagtttctccagcaggaggtcaagggccccggcacgtttgcctgctcgaccggcaagggctgccagttcaaggagcccgcgatgaacgagctcatcgacaccgtctttggcgacccgtacatcacgcttacgtgcgacagcggcgagtgcctgcactacacgcaggtaccgggctaccaggtgcgttgctgtaacaagggcaacgccgcgtgccagagctgactgcctttgcgctgctgttctacaagcgacccgagcggccgagcaacaagggctggatcttgctgagcgtcggcggagccgccctcgtgctgctcctgagcgcgactagtgcgtgtgcgcgatccctcttcctgacggctgccaactgactgagaggccccttccgcagtcatcttcttcctcgcccggacaccgaagcactcgggcggctttggctcgatccgcctgccggccgaggagacggccaagctcatgtcagatcacgtcccggcgacgcttcagttctcaaacatctcgtacagcgccggcgcgaagccgatcctgtcatcagtctcgggctcggtcaagcccggtcaaatcatggccatcatgggcgcctctggcgcgggcaagtcgacgctgctcgacattctcggcttcaagctcaagcgcggcaccgttggcggcgacatttttgtcaacggccgccgaatgaatgccgagggcgatgccttcaagcgcgtcgtcggcttcgtcgaccaggaggacacgctgatgagcacgctcaccgtctacgagacggtcctctactcggccctgcttcgcctgccgcgtgacatgagcctcgaggccaagaagttccggacgctcgagacgatgcaggagctcggcatcctcggcatcaaagactcgcggatcggcgaggctggtgcgtgctcatgtgctctgcagttgttgccgaggcgcgcgtgctgaacttgctccctcccttgtgcagggcgtcggtccatctcgggcggcgagaagcgccgcgtctcgatcgcgtgcgagctcgtcacatcgccctctgtgctcctgcttgatgagccgacgagtggtgcgtgtccactctatgaagcattccgctcctctgatcatccggctgactccctatgcgcttctccaggtctcgacgccttcaacgcgttcaacgtcgtcgagtcgctcgtcactctcgcccgccagtacaaccggaccgtcgtcttcacgattcatcagccgcggagcaacattgtcgccctttttgaccgcctcgtcctgctcgcaaagggccgcgtcgtctactctggcgagtatgctgactgccaggactactttgactcactcggccaccgttgcccgccgggcttcaacattgccgacttcctcagtgcgttctgaccctgttccttgctgttcttttcgaagcgctgacgcagatgacctcttgcagttgacctcacccagcgcgccgccggcgagcagacgtccgaggaccgaaaggcggccaatgccgacatcagctctctcgtcggtcggaacggggaccacgccgacgccgagaacggttttgccagcggcgctgcctcgtcgtctgcgagcctgaatcctcaggctgacggagctgcgtccgacggcgagtcggcagggtttgtgcaccgccggtcggccgtgacgaaggctaaggacaaggccgcccagctgctcggcacctcgtcgcccgccggctcgtcctcttcgtccgacgagctgcccgagaagctggctgcgctcattggatcgtacgatcggagtcaggtctccgcagccgttcgcgccgagattgctggcgctcgagctgtcggccatggtcccgccaccggcggaggtggcccctggggcgagcagggcgaccgtggcgtgacgaccggctacaagcgggcgagcttcctgacacagtttcggattctcagcggtcgggccttcaagaatctctaccggtgcgtctcggcgacctgccccttcaatcgcactcacggctgaccgctcgttcgctcacagcaacccgatgctcatggccggtcattacctcactgcgatggtcgttgcgctcctgtgcgcggcgctctaccacaagattggcatcgacctcggctcttttcagttcgtgccgctagactggatcctgccggcgtggatatttaggctaacgaacaatcttcttcggcctgcaggaaccgacttggtctcttcttcttcatcctggcgctcttcgctttctcctcgctcacctcgctcggtctcttcgccaacgagcggctgttgttcatgcgggagcggtgcgttcgagccagactgtcgcagcctgagtccatcgactgacaggcgccggcctcctttctccagcgccaacggatactactcgccgatcgcctacttcctctccaaggtgctctttgacatcatcccgctccggctcgtgccttcggtcatcctcggctgcatcgtctacggcctcgtcggcctcgtcccgaacctcgtcgagttctggaagttcttgctcattctcgtcctcttcaacctcgccgccgcgagcgtcgtcctgttcctgtccgtcgccgtcgccaacaacggtctcgccagtctggccggaagcctggtcatgctctacaagtgagtcgagcccgctgagctttctcctggcaggcggcagctgacagccgccttccctcgcggcgctagcctgctctttggcggcctgctcatgaactacaaccagtcgtcgctgccggtccgggtcctgatgaacctctcgttcttccatgcggcctttgagggtctgctcgtcaacgagctgcggacgacccagctcaaggaccacaaggtatgtcgtcgcgcccgtcgaaactcttgcgatgcacttcagctgacaccgtccacctctcgcacgacagtacggcgttgacattgaggtccctggcgccgtcatcctgtcgacgttcggcttccggtcgcaggccttctggtggccagacgtctcgctcctggtcgggacgatcgttgtctggctctcgctcagctttgtcgtcctccaggtgtttgtccgtgagaggcggtagtcgggtgcgatctgcaacaaatgaatttctctgacgaagacgctcgcggagcgggaagcgaggcaacggattactatcccatttagcgagtgtcgtatagaggagggtcgtaggcagaggaggccggcgagggaggcgtaaggacaaggatcgtgattgaggtcgagggagtgtataggaggctgcggcgggaggagagggaaagacagagagcgaaacaaaagacgagagcgttcgggggccggtcaagaaaggaagaggaagaggggcggtagacagcccgccctacagccgcaactcgtcaatgacgcgcacgtcggggacgacgagcccacccttcttgacggtcgcgcgctccgtgaggtcgaggtaaggcgtcgtaggcgtcgagtcgagtccggccgccgtcgaagctgaggtcgccgacagggcgggtgacggccagggcgaagcaaggggcgagcacggcacaggcgagcggtcgagcgaggggaacgaaaggtcgggcccgccgtcgcggatgatctcgtcgagctcgagcacggcgcgcgcccgctgtgggggcggaggcaacgatcggatcagtacgggtgccgtgtcaagacatgcagccaggaagacgtgcgtgtgcgacgccccagtaggaccatttcgaccaaggccagatccacgtgttgaggccaaccgagcgcttgacggcgtcaaaagcggtgagcgtcggcgaacgttcgccgagcgacaggttgcgcgtcggaaggtcggtcaggacgacatcaagtccccagctagcagccatcaccatctccttctcgtcgttgacggtcctgaagacgcgcagaggtaaaacgtcaatgacaaggccgctcaaggcttcgagctgtcggacgcaccagacaccgagcttcttgccggcgcgcttgcagtcctcgcggaagcggcggccgtccgcgtcgacgaggcagtcgaacaggagcgagaagccgtcaacgtaaggccaccactcgcgtgcgaacgggaccgaggcgccaatgtggaagcgctggatcgaccgaggcaggtgctggtacgacggcaggatgaaggacgggtgccagagaccgagcacgagccggggaaggatcgcaggccgggtggcaaggatggcagccatcgcagggaagagaagcgccggtcgggaagtcgtcttaatgtcaatgttgaagacgacgtgctcattctcgggctgcgggcagggaaagagcaactgtcgtcagtcaggcgggagatgtgtgcgacccagcgcggtcggactgacctgcatcagaaggtcaataacgtcctcaaagagcgggatcggctggataggcagggccgtcgtgcgcaggtgttcaatctgaccagcccagttctgctcgccaatgaggcctgtgccgtcagtcgtgcggtcgagccgggcgtctgcgcggcgacaaggcggagagacgacatcagcctgctgtacaaatgggacagatacaagatcgggcaggaggcgcaagagagcggacgtaccgtgaaagaggatgagccggccgtccttggtcagatgaacgtccgactcgagcccatgcgcgccttcgcggatggccgccttgaagctcgccagcgtgttctccgctggaaaccgatcgaaaagacggccgctcggcgtgaggggtgcgttcctgtgcgtacaagagccaaaaggaagacgaggagagactaacggtactcggcagaggcactggtggcagagcggacaagggagaaatgcgcagcacctcgtatcagcactcgctcgcgctgggacgccgtcgagcaaaactctgcgcaaagacgcgcgagaaggccagatacacggcgggtcgtgaccgattgaggaggaactagaatcgcgacaaaagcggcaggcgacgcaccctcggtgaccccacgtctttggccactggatgcgaccggcggtcggctctggagaggccacagggggcgccatggctgttatggtgggctgagcgcaggcgacgagggaggatgggtcagggtctgtcaagacgagcgggctgtcccgccaagaggctggatggggccaggcggtggtgggcatgtcaagcttggcgactcaccgattcggtcggagggaggaagggcggctggcaggtgattacgcctttgagctcgagcaggcgaggctgggctgggcggagcaagaggagagggcgcgggaggcggcgaggtgtagatggagggagacgttcgaggactgtgatgggcgagagcgggaggagcgtggtggggggcaggctcttgacgtgacgaacgtccgaggctcgacgaggaggggggtcgaacgttgtaacacggggtcgcagcgcggcggccgagcggctccggcctcgtactccggcctcgtctgggagcccagaagatcccattttgggctcgcgagatttccctcggtcgggggccaagcgcgtcgtcgtcgtcgacgaggaggacagccaacgaacgcccttcgacccacccgacagcctcctcaagcaccatctttcgcggcatggacagtccatctcggcgctcagctacccgcacgcagcggcggtcgcacaatgcgtcgccctacagccggtccaagtcggtcaccggcggtctcagcaggtcgagcgagctcccggtccacgctcaagtgagcaaccccctccttcccccgttctcgtcgccgacgggcagctctgacctagtgcgctcctctcccagcagcccgcatcggctatcgcacggacctcgtcgatccgctcactcttcaacctgatctcgtctcccttccggtcggccgctcccgccgccgccgagcgtgagccctcggacgacggcgcctctaactcggagagcgagtcggacgacggcttcagcgaagaggacgaacgcaatcggcaggagcagcagcgccaggaaggcctcaagttcaggcagagccagcgcaactacgagaacgacggcgaggacgactggtcagctcgcgacaaggtgctaccgagacacttgcttgcgggccgacttaagctcggcttgtacccggaggttgtactcgccaccctgacgccacagcatctgactcatgtgctacatatcctccgcctgcagttttcgaaccactcgcggccagccgccgggcaccagtgggcggctgcgaaccctctcgcggccttctcgcctcgcgtcaagtctgaggccacgcatgcccacgcgctgctccagatggaggcttcgcccggccgctcggtgccgcgatactttggcagcggcaacagcggtctgacgcgctcgtcgacgatgcctgccctcgaagggtctggtcgcggcgatggcgctcggcgggtccttcgggcggcggacgtcgaccctgtccgaggcagccgcattcaggaggagtcggaagaggccgcgatggacggtgaggaggcgtctgagcgaccagatgcgcagcggctctttacgagcaacttcgcggcccgctcgcccgcagatgcgtcccggccactgtttcatccgggcagcgcgaccgcttcgccccctcggcccatgacgctcgccggatccgtcaatggcggcttcgctcggtcgaatgccaacctttcctttctttcgccctcgcgcttttcggctcgctcctctgctggaggctcatctacttcctactctgcggcagcgccaccgccaccttcgcccggcacttactcgttcgcctcccgaccggggactggcacgcctgcgcgtggcacctctggtcccggcggcacgcccgcccgtcgccggcccatatacgttggcccgggcaccggcagcccggcctcgctccgcaagcggacgccggcgatggcgctcgagttcctccgcggcagggaggcagaggcggctgcgtccggcggcgctggcgacgcctcgggcggcacgccgggcaagcgacggcggatcgatggtagcgggcaggaggccgaagataccggaggcgaggaagcccgtgtcgagcgcgagcttagtggactcttgggtgctggctctgggtcgtcctccaggtcgagcggcctctcgtcgagcacctccgtcccagccaacctctcagcctcgacttcaactagccgcggccagccgtcgtctccctttaccttcaagccgccgccagcccctgcgatgcccgcgtcgcccgcatcagagcccgcaccaaagcgaccctactcgaccctatcagttcgcgtccagctcaggaacccgagcctctccgcaccctcgccgcttcggcaaagcacgagcttcggccgcgaatcgccagagggcaagtctccggtcaccaacgccttggccagcccagccggaggcaagcgtaaggagcggaccgagagcgccaagctgcttattggtctgatcaacgaggagaaggagaaggtcagcttgccggtgtcccccttcgaagtaaactaccgtgaaactgactcttggaacttgcaacagactgcgccgcctcctgccccggcatccaagccgccggcggcgacgccggccaagccctctggcctgcgaacgtcgtccaccccggcgatccagaacccttaccaggccattgcttctccctcgccgcgacgcaacccgcggcggtcggttgcggcaacaaaccggtcgagcaagcttgcggcctcgaccgctgctgctgcctcgtcgagcccggttgccgagcgcaagaaggccgtcaccgcgctggacctgattgagcaggacgttcggtcgaaggagggcccacccgcgagcccttcgcctgtagcctcggagcgcacgactgctgcaaccgaggatgagtcccggcagccggccaggtctaaccctcctctcgagcagccgacaccggttagagcggtcgaggatgtacctcccgcctgggcgtcgacccctccgcccgtcgtccactttgcgccgccgccaaaggtcacctcgctcacgcaggacgtgacgatggacagcgagtcaccgacgaagcagacgctcgacctcttcgagacgctcgagtcgcccgcttttgcgaagacaacggccttcacgttgaccgcctcgccagcctcggcgccgaagcctttttccttcgcacctgcggcgccggcttcctcgccgccaacgcctgcagcgccctcacctgccctctccactccgaccacgtctgtctttacggcgcccgcggccagtccgaaggaggaggctgccctcaaggacaagcacttgcttccgatctttacctttgtcttcagttcgacggcgacgcctctgccgacgtcggccgcccagacccaggccatgcgtgaggctaaggctgccgacaaagcctcgctcccggcctttgacctcctcgccctgtcggcgtcatcgtcggccagcgcgggaccctcgtcgaccaaacctccggcggttgctcctccgccgaccggcggcttcaactggggcgccgtcggcatggcaccgcccaagcctgcgaccgacaagtggacatgcggagtttgcatgataagcaatggcgccgacgcgaccaagtgcgctgcatgtgaggagccggcgcccaagaaggcggctccggccttgggtggtggcggcggcggcggcggctttgactggaccgcggccggcatgaagaagccgacccaggcggccgactcgtggacttgcggcgtctgcgcggtcgtcaactcaaccgataaggcgaagtgtgctgcttgcgaggagccgcagcccaagtcggccgctgctgccacgtcaactgcttccgcggctctatcaacgagcgctgcgccccctgtcggagccttcaactgggcgatggccggaatcaagccgccggcggccaagccggccgacaactggacgtgcggcgtctgcatgctcaccaacactgccgacaaagcgcagtgcccggcatgcgaggagccgaggccgaaggcggcggccgcggctccgacccctgtggcgacgggcggcttcaactggggcgctgccggtttggcggcgcccgtcgagaaggtcggttgggaatgcggcgtgtgcatggtccagaacgacgcggccgccgccaagtgtgccgtctgcgagagacccaagtagcggcgggcgagggcactcttctcccctcttcggaccttctgctttcggacccgctcgctgtgcgcggattgatgtcaccttaccattcagagttgcggtagatgaaaagagagaacataagattcgcccgcctccagcccgacacagacggagctgggcacgagaattgtcgaggcctgcctcagttggcaacgtacttcagggtgagagcgaccgcccgggccgagcccttgacgatcggaatctggacgctgcccgacgggagggcgttgaccgagaaggcagtcgagccgccgaggttgagcgtgccgtcggcggcctaggggagggcgctcggtcagcgctcggtcgtgactggcaacaaaaagagaacgcaccatgacaaactctgcggccttagtgacgctggccgagcagccaaagacgcccgtcgttccatcaaaagcacagaggcccttgctggagctgagcgtgacagcgccgccctggacctggccgagcgtgaagccggcgcacgagccgccgtagtaaagcgtgccagccgagatgacgcacgtcttgtcgggcgtcgtgccgtcggcaagcacgccgtagaggaagcccttggcggcgggagcgccggagggggaggagccagcgaccgaggtcgacgtcgaggggagcgtgacgtacttgggcgagtactgagcgaaggggcgcagccaggaggggagggggggggggaggtcagtctttgcccgtctctgccaagtcgatccgcgagcgctgtcgcaccttgatgccagtcgccgggcaggtcgagcccgagccgacgagtgcggcgggcacaatgtcaccgtcgacgaacgagccgcgggacgagtagtggaaccagagctcgttgaggacgccattcttgccgcaattgacgttgacgccgccgccgtgcttggcctcgagggcctgggtgatctcggcaagtgtgtacgtcttctcgatcgaggggacgatgccggcctcggcgagccagtcgtatgccggcagggccttgaagaactcaaccgaccgctcaaagtacgagacaatgttggcgttgggatagtagtttgtccagcattccttcttgagcgtcgaaatgcaggtaccgtgcttgttcgtctcgtgagtccacaaatcatcgttcccgttgttgccgagccagaaggtgttcatatagtcgagcagctcggtcttgccgtacgactcgaggacgtctttaacgctggtcaccctgaaagacaaaaccaccggatcagtctcgcattctcacaaataaggcgagcgagaacgaggacctactccattgacgggtcgcagtacgcgtcgtaggtgccgtcgcagcggtcgggccaggtgccgtggccggtccatgagtcgacgggccccgacgagccctggccggcgttccagactggcggcgcgagcagtgacgtaaatttgaggtcaacgcatgctctttaagctttgagagagaagagagaagtgaaacgggagagaacggacaaaaggtgacgagcaggtgcccctgctcgaggttgcagcacgtgtcctcctgcgggccaatcgagcacgacggcgcgtaaaacgacggcggctggacggcgcagaccgattttccgaccggcgccgtgcgggcgggcccgggggcggacgagatggacgactgtcagaagcggattgggagatgggggtcagtgtgcgagggttgctgcgcggtcgttgctcgcggacgcacgggtacggtctccgaaggcgcggccgaggcgacagaggtgctgatgacggtagtgacgggctccgagacgatcgccgaggccgaggtggcggtaatcgaggtcgaggttaaagcgatctgggtggacgaccgctggaagggaggcaggagacggggggcgctgtcaaccgccagcgttcacgagcagcatcaacgcagggcgcaaatgatacgcacgacagatgacgacgacgagaccgggacgccccagccgggcgggttccgaccgccatgcagcagcctgtagacccacagctcgaacgccgaccagagcttgtgaatctgctcgccgagatttccgccgccgttgccaaaggtgttagcctgccggagctggtcgtcctgcgatgcagcaggggcggcagagacgaggagggagaaggcgaggacgctcgcgaaggcgaggagaggggaggccgtggcggccttcattttggaggggcggtttcaagggtgaacttgaggaagaacgacacctgttttgctaccggtcagcgtccttttggggagatgagctttcgcacgtctccgggccggagagacgataggtcagagagaggcaccatgcgagtcgcagatcgttcccctaggctgctaatatcgattaggcgaacgttgcgccgctgcgccgtgagcgaggccagccggcggcatcgtgccgaccatcgttcaagggggcaaggcggcgagcgggcgagctgcccaaaacccgtggggtgagtaaagcggccaacgtgcagcagcgtcggggctaattgaggttggggcgctggccgactcggccgacggcgacgacctctgcctgctgctcgagctgtcagccgctccgaatgtcagctgagcgaccacgctccgggcatgtcgggatgctcctcccctcctttctggtcggagccgcgccgatgggcagacagggagtgtcgtcgaaacggccggcagcagcgggttcgacgtggtgcccagtttcgctagctcgagtcgggctcgaagaggcaaggcgagccgcagcggttcaccattgagatcagccgacctgcagagctcgtcgcgggcgagcaagtgcaggtccgaaagcgttcaatagcgaccaggtcatgtatgtagtctgcgcgacctggaagaggcgagctgtcgaggaggagcgtcgtcgtcgggagggccgaaagctgtgacgggacttagacggcgggccgctgcgtcatatttgaatctttcgcctctcgccgcccgcgccgcccgcctcatcgcactcgcctcgcctcgcctcgcctcgacctcatcgatcctcacccgcagacccgcagccactccccttccctcctttcaacaaacagcagcagccatgtccgaccctctttgcccagtttacgcgcccttcttcgtgcgtccatctttctgcgctccttcccggcgctcgctcgtggcggacggcggccaaacagctgctgccctgccccgcagcctgcgaagcgtgacttctcctctcgacctgcgagctgacatgccccgccttgcctctctcactacagggtgtcatggtccgtctcgctttgccgcagtgcgacaacgccacctcttctaggtggcggctccgtctgccaggggtgtttgagctcggccgctgacgatcgcgcttcggccccttccctttcgtccgcggtgggattcctttagggctgcaccgccgccattgtcttcacctgtgagtctgctcttctcgtttctccgccgcgtccgctcggagaagttggaggaaggcgacgcgagattccaaggggctctttggtcctcgcggggtggtggacgcgatcagggctgaaagggagctggagctttcacatctcggacgggccctcgaggactgtcatgcaccgacaagaggcaagaagctgacgctctgcttttatctcttccacaggcatcggtgcctcgtacgtctcgcgcccgcttggccaggtcgttgggtcccgagggcgaccgatctctggctgaccacaaacgccgctcatctcgctctcctctgcaggtacggcacggccaagtctggcgtgcgttcacaccttccctcacttccatgaccgaattggcgtgctgacgacgactcatttggcgcttcttctaggttggaatctcggccatggcggtcctccggcctgacctgatgatgaagtgtgtcgtcccggtcatcatggtgagcgccttccatctttgagcctttccgctgcccgtccacggcgctgcggctgacatggcgctacctccttgtaggccggtatcattgccatttacggtcttgtcgtctcggtccttgtctcgggctcgagtaggtctcctctccttcgctgttaccccaagcccgcgagcgtctcgcctgacttccgtccccaacagtcacctcgcccatgcccctctacgtcggcttcatccagctcggcgctggtctctcggttggcctcgccggtctcgccgccggctttgcgatcggcatcgtcggcgacgccggtgtccggggaaccgcccagcagccgcggctgttcgttggcatgatcctgattctcattgttcgtcgcggcttcgcttgatccctgatggtaacagccgagactgaccgagctgcctttcgtctgggacgcagttcgccgaggttctcggtctctacggtctcatcgttgccctcatcctcaacacgcgcggaaacgaggcccctgctgtgcgtcggccaccggatctcgtgtcttcttgcgtgtcgaacgttggctgaccactcgcatcccgacacgcagtgcatcaccaactaagcggacgatgctcgctagagagaaggtgggaagcaaggaggagcgatgaggagaacaaggaggagggtccggccacgagcgcgtgggccgaagagatcaagaaaggcgtggcaagggctccgagggtggaggctgcagcagcaggggcttcgtccccgagtctgctggagcgctttgctggcctgcctcggactattcgaagacggattgctttctttcgtgccgcgggggaagtgacaacgggcctttattgacgaaggcctcagcctacggcttggcagaccggtctctcacggatcagagaggacctctgcttcatgctcggcgactgacaaggcagtcgtacccaggcacttcgcaagacgtgagagccagcgtgagacggagatcatcgtcgcgacgactggcagcgaatcgtcagccattgcgccgctcgtccgtcctctctccgaccaccatcatctccctccagcctgccatgctgtcaacctcgctgcccctcctgctgcccttgctcgcactggcacaggcgagcgcccacccggcggcgtctatcgtcggcctcgaccctgctagtgagcttctcgagcccatctcgtttcctcggcgatgtcgcgcgccggcgctggcaagctcacgctgaccctaccctcgccgcttgcctgccttcgcgcagagtacgacctctacgtcccctcgagtcatgggatatttgcctgcctcgatgggagtaagaatgttcccttctcggcggtcaacgacgattattgcgactgcgaggacgggtcggacgagccgggtccgtcttgctcctccctcttcctctccgactgctgctcgccgagctcccgtaggctgaccgatagcgcattctcgtgggacaggtacatcggcttgcccgaagggcacgttctactgcgccaatgaggggcacgtccccggtcgggtcatctcgagccgcgtcggcgacggcatctgcggtgcgtgcttcccttcatacaccttagcggaccaggtccatctgtgcgacgttcagctgacctcgatgcctcgtctccgctgcgccagacccggaatgctgcgacggctcggacgagcccaagggcgagtgcgagaacgtctgcgaggcgctcggccgtgagacgcgcgagaaggacgaggcggcggccaagatccgtcggacggtgcgtgccgtcattcacacgagtaggtccaacgcgtcgcatggctgacgcttatctaccctggtctgtcttctctagggctccaagatccggtcgtcttacatcgcctttgccgacaaggagcgccggcggctcgaggccgagattgttaagcaggaggcggctgtccgcgaggccaaggccgagctcaagcgggcccagtcgacgaccgagagcatggaggcggcgatgagtgcgacgatcgaccggcgcaaggcgtcccgtacgtggtctgatctgtctcgtcagcgctttgcagtcaactgagcggcgctgtctctcctcctcagctctttacaagtcgcttctcgaacaccgctcgctcctttcgcgactgtcaacgcgccgctcggtgctcgagggcgagctgaccgagcttagaaagatcatggacgacctcgtccggtcgtacaaccccaactaccaggacatgtctgtccgggccgccgcccggggctatatggagctctattatgacggccgagtcgcgccggccgagggcggcgagggctcggaggagccgctcgtcgacaagcctcgggtgggtgcggagggggaggacgccgacgtcaagccggaggagctcgcgcaggtgctcgagaagacggacgtcgacggcctgctcgtcggctgggaggacggcaccgagggcggcagcaacgtcgacgaccttgaggcgatccgtttgtcctttcttgctcgagtatccggcttttggtcttcgactgacgcgacgcacgttgcccggccgcagtcttcaacctccacaactacatccccgacccgctgatcgagtcgtttgacttcctgcggtccggcctcgtctactggctcgtcaagcttggcgtcatcgagaagtcgacaacgcttaagccgtcggcttctgccaaccgtgcgcagacctgtccacttacagtattgctcgtaacgtgtcgctgacagcgacgctctgtcttcgtcctccaggctcgcccgaatcgcgcgatgccctccacaaggctgaggagactctcaagacggccgagacggcattcaagtcggccaagtcgtcgctcgccgacatggccgaaaagtttggcccggagggcgagtggaagaagctcgaggggacgtgcgtcgagaaggacctcggcgagtacacgtacgagctctgctggtttggcgacgtcaagcaaaagtcgaacaagggcggggcgaccaacaacctcgggtgcgtcgatggccaggccgactctaggctggcgacgtgattgctgaccccttcccctgttgtgtctctcccggcgtccacagcaagttcagccggtggaacactgacggcaaggccgagaagggcaccgagcagtactatgcaacgcaactttacgacaatggcgccaagtgctggaacggcccgaaccggagcgtcaaggtgcgtcgccaacgcgtcgtgcagtgagtgaactctagctgagcgtgctgatccaaccccttgcgacattctacagctcgagattgcttgcggcaaggagacggagctgctttcggtcatcgaggcggaaaagtgcgagtatgtcgcacgcgtgacgacgccggccctctgctggccggcggccaacgaggccgagagcggcgaccgggcagcggcggccggcaagcaggagctctgagcgtcgaggccatatatggaaacatttgatgtcgtttaggagcggcacgctgggtcgtgatcctttggtttgagagtgtgtcggatggaggacgcaatgcgccgagaatcggcaccagctgcctcccgagcgatgaccacgacctggtcagagaattccgacgaacagtactgtccgccagcgctcgtttgcaagacggccaatgcgtcggccgaagcagagctgcggcggtatacgtcctgcttggaatcgaccgctgctgcggaacggccaacgctcggagccgccgctgccatgacgaactcatcgttcggtctgcttccttccttcctcatctcgcctcccaccattacccctgcctccctctgaactctccaagaatgtccggactcctccacaaggtcggcggactcgtcgcacacacgctcgctccaggtatgtcgctcgtcgcgtcttgtcgctgtccgctgcacgtaggtgcaggcaggttgacgacgaccgacatctctctctaacgatcacaggaacgcccgaagccgtccggtatcacgacgagcagacttcctctggctctgcagctggtcagacgtcgaccctctcggagcagtacacgtcctactcggaccagcggacgcccgacgcagcggccgtcagcagcagctcgcggcccgtctctccttcgtcgtctaccgccactggccctgccatcgactctggtagctccgctccgctccctcatctggacgcgctcgaccgcgtgggaacgacgaacgcacgcgagcatacgagcggtggcgaggttccgccggcagacgcgctcgctggcgggtcagccatcgagaatgaaatcgcaaagatggaggctcggacaaagaccttctaaggcgaccgaatggatcaatgttgcttgtactgaattctggctagcgcgcttgcgcagggaaggtgcaggtgacagaggagtcgcccctccatccttcgcactcgcacgcatgccgcctcatcagtcagaagcatgacagaaggggctggggcctccacgagggagggcggaaggcgaggcgggcttttacaagtgtaagtggcgcgagagaggaaggaaggaggaaggggtcggagacgcagggtgtcgagtcggactatcggagggagggaaagcgtgcgggcactcatgcaagcgtgcacggcaacggatcgtaggcagggtcgtgaacagatgggagaaaagggaagattgcgcggagggcaaagagagtccagacggcggtgccactctcagcacgcgcacgcctccttcttggctccgtcctcgccgagcttcacattctggcctgacgacgcggccgtcgaaccagcagcgggcttggccgcaccagccgctcctcctacccgaccggcaccggcgagagtgtcaagcgggatcttcttggctgaaagatgcagaagagcgaacgtcagcccgggtcgttcagcgggcgcattcgagtagagggatcgcaccgatctcggtaaagatctcgccgacgccgttacccgacttggccgaggtctcaaagaagagcaggccgctctcctcagcaaaggcagcagcgacttcgcgagggacctcgcgaagcgaagcgtcgccaccggtcggagcagggtcggacgactcggcgtcgtcggaggcggccggtacgtcagcgtcgggggtcacgaggtcgacctgaatcagggagggggatgtccgtcagcgacttctgcagaaggcattgttgacaacacgcagtctggtttcgcaccttgttgccggccagagcgatgacgatgttggggttcgcctgccgctggagctccttcacccaagcctttgccttgtcaagcgaggactgacgagcgggcgtgtgagcattaccgtcagtgaaagcgcaagcttataaggggtactcaaacgaagggttgatgggacaaacggctctcgtgacgtcgtagacgacgacggcggcgctggcgttacggctacgagaggaggattgcatgtcaggtcagtgtccaccgcaaaacgagattgtgtgaatcaggccagtatggtggggcaagcagcggacgtactagtacatcggtgcgagcgagtggaagcgctcctggcccgcggtgtcccagactgcaaggggaggatgacagtgtcagccaaggatgacctcaactcgctcgctcgccttgggaccgaggatggcctagcgagagaggacgcactctcaaactgggagaggaaggatcagggggaggcaccggtcagctgcgcagtctaccgccatcgctctcgcgaccgacagtccctctccggcctgcgaagaagacgcaccttgatgaccttgtcctccaggcggcacttctgagtcagaaacgctttgagcggacgaagaacgagttggcaggtcaatcctcgacgtccttgtgccaagagtgacgaacgctccgagccaccggggcgtcggagggcgcgaaggagtcgatgaggaggcacggaccggcaccgatagtgggctccttgttctcggcaaaatcgttgctgacaaagcgcatgacgagcgacgattttccgacggcagcctcgcctgagttgaagggaggaaagagagggtcagccgtgagtcggacgaagaggagccgggagggtcagccggccctttgaggacgagcgacgtccttggccgtgcggtcggattagacagacctaggaggacgagcttgacctggatcggcttggaggatggctgggcttcagcggtagacatggctggcaagggggatggagagagggaggagaggatttggtggggtcgggaagagggaagcgagcgacgacgacaggctgtgtgcgttgttcgcgcggtggccgcatcagccagcctagttagggttacggtcgaggctgacgaaggagccggtcttcagcagcctacggcgtcccttttctacagcaagaggctagagctgacgagctcggtccagggagatgtctgtgcgtcccttcggtggcaggaagagcgagagggaaggtcgctcaaaactcgacatgtcgagagaggatctgcagccggcgctgcgcagcgcctgcctgacgggcccggcaggacaagcggcatcctccccttcggcctgcagagcttcagataaagcgtcgccagtgatcaccgacgatttagtagctctcctgcctgagctcggcagtcgaagcagttgaagaggaggctggagggcagactcgtttgtcgctcctccaaagtagcctgccgccgcctgccgccctgcgcgcggaggtcctttgctgtggcgctctcgagctggcttctcctgaccgactcccacacccgactctcgaccctcatcccgtcgacccctcccttgtcgccaacacccacttacaaatccaaaaagagcccgactcgcccagcatgcttcgctccacctttgctcagtcgacccgcctcgccgccgccgccgcctcgtcgtcgtcggccgtctccactcgcttcgtcctgcccgcgctcgctggctcggcacctcggctcgccttcgccggccagcagcagcgccggtcgtaccatgagaaagtcatggaccactacaacaagccgcgcaacgtccgtcctgcctgctctctgcgtgctcgtcagccttggccggcgacggtcggccagcgtcggctcttggtccgatgtggacgggcgaatcggccgcgagccagcacgcagccgatgctgaccgtccttcccttactctcgcccgatcgcgttacaggtcggcagcatggacaagaccgacaaggacgtcggcaccggcctcgtcggcgcgcctggtgagtgccggcgtagcgtgggcgtgcggcgctaggctccggcgccgaagttgctgacccgcctgacgtgctcctccacctcgacctcgccttcaacaagcttgcggagagtgcgtcccttttgctgctctgcgcacctggctgacaagcagttactcgctttacgttctgggcccggtcactgacgcctgtcctctccctttcgctcttcgcagcgtcatgaagctccagatccgggtcgacgagaatggtgtcatctcggacgtccgcttcaagacgttcgggtgcgtccgtgaccggcttgcagccagcattttgtggtgcaacgagctgatcgtctatgtctattgccttcagctgtggctcggccatcgcctcgtcgtcgtttatcaccgagcacgtcaaaggcatgacgcttgagcaggccggcaacgtcaagaacaccgagatcgcaaaggagctcagcctgccgccggtcaagctccactgctcgatgctcgccgaggacgccatcaaggtgcgctgccgagccgctcttgcgagatgtccagcacggcaagacttgctgacttcttctctcgggctgcacctcagagcgccatccgcaactacaagtccaagcgcccgacggccgcgagcccgattgtcgctgatgccgtaagtcttcatgcctttcgtctttcacgactgctatctagctgacaaatcgccttctcgctcatccttctagcccccttcggcgtcgacgacctcggcctcggcttgagtgtgcctcagcggtcgttctccctctgagctcgcgtgtctcgtctctgtccgcttctctcctctggcgcaccgctcaaggccctgtgccgattcaccttcttcgacgggtcacgagtctttctctggctcgcaccgccgccgctgtagcctgacccgagtctctcgatcgttcgacctcatgcccctcctcgctcccttcatctcctcgcgccctgcgtcctacgctggagcctctgatcacatgtagcagttccgatcgcagatcgggcaaggtggggatgggaggacacgttatgagaggaaggggtgcttcgatccaggtcggctccgtgtcacccgtgcagggcaaggcgatgagagcgaggacgggtgcttcctcctgcacattcggttggacgacagagatgcgagcgtacgacgcctgcccgtcctggccactcggatgctcccgaacaagaactcgcggcatcgctctgccgactgctttcagctgccgttcgccgcagacgaggatgaaggccgaggccccgctgcggggagcgcagcagacagccagcgacagaagacgaacctgcgagaccgctcgcgcgcacgacagccaggacgacggcagtatgcttagagagcgtggagggctttcctgacggcaggaatcctgaacgacacgctctgggcgttggcgacttgctggcgtggtctcggtcggccggcaggggcagggggccaagctgcgagaatagacaggccggccgctctgcccgcgcggtcgagggccggccgtcccgggctcggtcgaccctcctcctccttcctttccctcccttccttcctcacagacaacacccccagcgcccaacccactccacgctcccatcgccatccgtccctccgtcggccagcagacgctccctgcctgaaggaaaaagccctcctgccggccagagtcgcgccttctccttgcggcccggcgcgcgccctgccccgattctgctcccaccgccccaggtcatgcccccttcggcgggctcgcgcccgtcctcgtctgctcgaagcagcagcagcatcccgcccttgccatcccggccggccttgctggctttcatcggcctgctcgtcgcgctcggcccggcaccggctttgggcgcgccccggccggcggcgacgaaggcggtggtgacagcaggcagcgcaggcccgagcagccagccggtggcgcctctccccgccgctcgacctgatgtaccagcgccggacgacactgtcgccgtcgtcgatcagtgtggtcctgctcctctacccgaccggagcagcccctggccgaggagggcagaggctgccggtgttcgcgagggtggtgcggatgccgcccgccggccgcggccgccctctaggagacctggccgacctcgtcgggcgacacccacaggcgactcgtcgcctgtcgtcagccttccttctgcgaccagcagcagcagcagcagcagcagtcgaggctcggtagttcatccgtccgcgctcgccagcggaagcagcaccgtcccgacccaggcgccgaccgtcttcgcccagcgggcggcccatatgttcggcgtcgtcacctcgcgagccatcgtcgacaagtatgaagtccaggacgacggcacgggctgggcgctcgcgacagattgggagctttatggcgtccaggtccgtcctagcctgccattgttatctcgcgctgccaaaggctaacctatatttatctcaccaccgttgtccagcttgccgtcgaatcgtccgacgccgccccgacagcaacagccgacgaggtcattgcgacctcggccgtcagctcgtcgcatctcgtcccgagcccgaccaaactcccgcctggctgggggagcggcgaccgcgacgagtttgaggtgccgctcattgtcgtcatcagcgtcggcttgacgtgtatcgtcctcgcaaccattttcacgtgcgcctcttcccctctcctggctgtcctgaatcctccatctgaactcattgtcgcccccctcagctttctcgcgagacggaacaagcagcgccagctggttcgccgagcgaagcgctacgaggagaagaagctccggcgcgctcgcgaagcggtcgaggcggcagaggcagctgcgctggtcggtggcggcggcgacggaagctcgcccccgaccagcggtgccggcggcgaaatgcttcagatcccgcgcgccgcgaccttctcggccggcagaggctcggtagccggcgacggcgcgtcgatcgtgtcgtccgcgacctcgagcagccgatcgagcagcaaccgcttcggtggcggtggcggcggcggtcctggctcgggcggcggtgccagcggtggaggtggacctcgccagcggctcggccgaggccggatggtcggcacgctccgttcggccggcaagaacttcatgcgcatctctaagggcaaaggccgagctgcgccagtcgagacggacgagccggaggccatcatcggcgacgacgacgacttcgcggtggatcaaggctcggttcggtcgctctcgcacaacgccgctgagcggtcgtacgccgaccagccgtcgagttcgaatcagcctctggcgtcgccaggcatttctgccggcgtctcgcccgagcagattgtcgtcatcaccgacacggatgccgacccgctaccgggtccgcctcctcatccgagccatcacccaacgccgccaacataccagtcggcctcctcaagtggtcggcttccgtcggcaggtgccataccgcggccgactggatcagtctcggacgacggtcatctgtctgtcaccggccccggctctccacgccgtccaacgagggccagcacggccgatggatcgcctctgctcggcccgacaggagatgacggcgacgacgaccacgcgccgccgcctctccttccgaccgccgcccttcctgccttgccgtcctttccacgcgacgccaaagttcctcttcggcccccttcgcccccgtcgtcgagctccaatgccgactccgcgctcccttcgacgacgccgacgtcggccgaggcggcggctgtcttggctcggcacgcccggcacgtcgcgacggacgacaaggctttgctggctcggatggcggcggaaggcccgtctgctccgcccgagtcggacggcgctacctctgccgatgacgggttggaaggcagcgcgccgcccgtctgggaggcggccgactcgctcgacgaccatcagccctcgctccaactcgagcagtcctcgttgccgcctccgatagccaactcggtccttgctcctctcggcccgagcgcatcctcggctatcctcccggctccgcctcgccagtggggtcagaagacgctcgccgatccgtacgcagaaacgacggcccggctcctctctgccttggacgaccatgctgcaggagcatcgccctcgtaccctagcagcggcccgagcgagcctccctctgctccgcccctccttcccgacgacgaagacgccgaggctgaggcctcggcaccgcccttccaccccaaccttgatgcggaggatacgctcgctcatgcgccgaccgcgccgacattatcctccgccgcagaggacgaggacgaggaccaaggacacattgtatagatctaccgcaatccaatctctaccacccccctccccatctttagactaccccccgcaggagcatcaggtctctagaatgttgtgttaccctttggtcagggccgacttccttcagacgttgtggcatcctcccattctggcatccacatcactctgccgcacgtctctatgcagtttctcgactccttcttcctccgcacatctggtcgatctctatccaccctgtcgcatccgctcgtccgtgtccgctcaagacccaccctttctcgttactggacgcaagctgggtcaaatgaaagcctgacgcggcgcgtccgaatcatctatctccggccggctttgtccgcgcgcgcgctggcagaatttgggcgggcggcgcaagttgctgagcacctctgcgcgagcctcttccggtcacacactccgacccccaacccacccttcctcggagaacttggcgtcctcacacacgtttgacctgcttatccttcgttctcgagctgaagaggaacaagctaggctagacttggtaaccgctaggcggctgcctcaacaacgtcgtaccgtagcggtcagctgaccttctttgtttcatcctcgctccactgttctcaacgttcctctcagccgcttatgtcgcctttcctgcccgtctcgcggcccttccaaacggcggcacactggcaaaaggacggcgacgcaaaacgttatcgttgtagtcgaactgggaatcgaacccagagcgccgaggtgtggactcggagttttaaccgttaaactattcaactctcggatagatcgcctttttcacaaacctctaaaatccacaaaaccctgggctgtacaaagcccccaaattacccgactcatcctgactgcctgacccatcttttcttccaacgttagagacaggtcacacggtcatcaagcagagaacatctctttcccctcttcccccgaaccctcccctcgaggctcagcgcaccgacgaccccccgaaccccgtgctcgtcctgatctcgcctagcccggagccgctgctgccgccgccgccgccagaccggtcatggccgccgtggtgccggctcggcccgggctcatcgcgccaatcgcggtctcggaggccgcggtaggggtcgtcgatgccgccgtagcccggggtgcggtaccgctgcggctggtcccggccgcgcggccgcgtcaggtcccagagccatcccgcagcgcccgcaagaccgaggcccgtccagaatccaggtcgccagccctgcgccggcggctgggcctggtgcggagcaagacgggtcttgccaggaccgggaccgccgcctggcccacctggtcccggcccaggcgagtagggaggcggggcagagtcgctagccgagggacgacggtcggcgaggcaggcgcggatgaaagacgtcgcgatgagcgcgagaacggcaaagaagaggacgttgaagacggcggtcaggatgcgctggcaggctgacgggaggccggtacgacggcaggtcagcttgaataactccaaccgacgcggacggcaggatacacgcacagccagacgagcagaaggagcggtcgcggccgggtccgccgtcgtcgacgccgccgtccttgaagagcgtgtactcaaggccgcacgagccctagcgggggcagacgagtgacagagcgagtcagcgagtgtcaaggttacgatgctgggagcggcgagctcgaaacgcacctgcaggacgttcgagtcacctggcccggaccagccctcacagctgacctcgaccctgccgagccggagggctttagggaggtcggctgagcactgcgcggagggaaggggcgaagcgagatgcgcagtcgctgatcagcaggcaaaagcatagggacgaggacgagctggcaacgggacgcacctgccactggacgttgccggtgccatcgtcgcccgcgttctggcactggacgacgtggacgaagcgagcgtactttcggcaggccggccccatgcatgtcagctgggggatcggccggccccgccgggcggtcgtcagggtatccgggtagagcgtgctggacgagcgagaaaaccggagagggccatgggcaggtcagcagcgagctctctcgagtaacacgagcggcggatgactgacagcgtctggatcgaggtcagcgggacgctgctgtaggtgggctgtgctgcagcagccgacggcctggcggcagtggcggcgaccgcgctgagcagcagcagcgccgcgagcgctggcagccggtggagggcgagcatggtcgggcgagcgagggcgaggcaggcgaggtcctgtagcgtgagtctgggctcgagtgagaggggtccactgggcagtagaggaggcagaggtggcggtcgacaggcaagcggctggaggatgctcgccgggtgcagatgagccccgccggctgcgctgccgacgacactgccgacgacacgttcctcgctaaccgtcaccctcgtccctcgatcctacctccttcaagatggccccgctgacgctgcatacgcatctcgagctcttccgctcgccctcgtccttcgtgcgtcgttctgtggtcttgcggtggcggcagatgcgagctcaaagactgacgcccgccaacccctccgacgacggctgcgtcatctctaggtcgtccaggcgcaggatggcgcccagctcgccttctctcgggcgagcggcaggatggacgcctacagtcagtccctctggatgcagcatctccacttgcgccgaagcctgaccttgcgatccttcgttctcaccccatgcctccagctgcgaaggagaagaaggaggtccggggtgccggcgagcgtattgccggcgtgctgggtcggctgtcgcttgcgaccggtacgtctacctgtagcatccagagggctggccttccgctgacctactgctcggctcctgcgctcgctcggcagtcgacgtcctcatcctcatccgttcggcgaccgccggcccgtcactccaattagctgcaacttacctcgcgtcgtcgtaccttttcctcccgctcacgccaaacgagctctcggacccgcgcgaccagcacctgcttaagctggccaagaagggcctgaacgaggctagcggccggctctggtggagctcgagccgggacctcaccgactcgctcgaccggacgtggaagaagaaggcacaggatggccggccgatgtgggagacggtgcgtgctggatcgtcaaggtgccgctcctgagctccgcagtgtgctgacgtagcgctcttcctgccaggccgaggaccgcttcttctttaacaagcacctccaggcgccgctgatcagcgctgccaagcagggcggcgcgcaggctgcagttctcggccgcttcatcatcccggccatctttggcagtgcggccttcgcatatgcttcgagcggttgtcggcagtgtattgactgcctcgtctgccccatcccgcagccgtcgtcgtccgccaggcgaacatcaatgcgcaccccttcacctttgcgcttgtctcgcgccgctcgcgtcaccgcgtcggcacgcgctactttacccgtggcgtcgatgccgacggccacgcctctaactcgaacgagacggagcagatcgtcgtcgtcccgcggtctggggctgagaagggcgaggaggtcttcagctacgtccagacgcgcggcagcgtccccgtcttttggagccagatcaacacgctccgctacgtgcctgatctccaggtcatggacaagccatcgacggtgcgtcctttgctcagccttccgctgctcaggcccatctgctgacctcggctcatacccctcctacgcaggccgaggccgtcaaggcgcacatcgacgaccagcttgagttctacggcgagctctaccttgtcaacctcgtcaaccagaagggctacgagaagccggtcaaggaggcctttgagcacgcaatggagcgcctcggctccgacaaggctcattacgagtactttgacttccaccgcgagtgcaagggtatgcgctttgaccgcgtcagcgtcctgattgaccgcctgcgcaccgcgctcgaggaccaagggtcagttgatcgctggtcttgcaatgatgccgcttcacaaagctgactgtcatcgtctccatccagcttctttcacacatcgaccgcttcgccagagcctgcgcacctgcagaagtcgatcgtccgcaccaactgcatggactcgcttggtacggcttcaggagcgctcagttcggctttctccttctggcgactgacgccaaccttgacctgcccagatcgcaccaatgtcgtccaatcggcgcttgcgaagcacgtgctcaaccggcagctccacatcgccggcgtcctcggcaaggagaccatcgacgatcacccagacttcatccacatcttccgcaacggtcagtctcaatgctttgatatcggaggtccgttcagcgatgctgatcgacctcttacttcgcctttgccagtttgggccgaccacgcggataccatctcgattccttacagcggcactggtgcgctcaagaccgacttcacgcggctcggcacacggaccaaggtcggcgtcctgaacgacggcaaaaactcggtcatgcgctggatcaagaacaacttctttgacggccagaagcaggtcggttggccgagcgagtcctgctcagccttccagctcttgacactgacaccttctcgctgcgacgcaggatgcttatgacgtgctgaccggccgatggagcgtcgctagcccgggcgagagggagcgcctctcgcgactcctgcgtgacgagcggtcgctcacgatccatgccgtgcgtctgccagtctgttccagcgccgacgacttggaacaggacgtcgatgctgaccttgctagcggccacaacagatgccctacattttcttcttctcgcttttaatgctgctggcgtcgctcgtcttgccgcgcttctcgagtcagtgcccctcgtcggtcgtcactctgcgccgtcccacttcgctgacgctgccctcacccgcgagcagaggccccgctcgtgcttttcatcctgccctggattgtcgccctggccatctcgaccctcttcattctcggcaacggcattgagtgcgtcctcatcctgaccgcgggcttcgggtcgaccggctgctgatccaccggcgctctcttctcagatatgtcaactggccgcagctcaacccgccggacgagatcctccagtacgagggcagcggcttccggagccgacgcaacggccgcggccaggacctgctcggcctccagggccggcgagcggtccggaatgtcgaggcgcagctcaaaaagatggtgtagatccgacgagtaggccgagaggcttctgtagatgtgacaaccttgcgatacaagtcaagcaaattctgaggtgtggaaacgaagatctaagcgtagtacttgaccggcactccggcgacgaccgtctgcaggtcaagccgctcttggccctcgaggtcaccggtccgacgctgggtgatgagcttgtcgtagcgggccgaagcctcctttgagaagatgtcggcctgcttggccttgacccactctacaaaagggccggatgtgactgtcaaggccggcattgagcgaagggcaagaagagatggtacgcacgagcgacggtaagcttgggccggggaggctcctgggcgagcttctcgtagatgccctcgcgctcgagcaggggcgagtcctggacgacctcgactggcacgtcgttgttgggccggacaaagtagaggacaccgagccggtcgaatcctgcctggtcggcaggagggacgctaacgcggtgaacgctggacttgaggtagccccccgagaggatctggagggtgtcgcagatattgacagtgatctggcgaagcacaaggaagtcggtcaagtcagcatcaggtcgcagcaaagagccaaacagtcgcgacgcaccgagcccgggtgcggccggacccagaaccacttgccgtcgtctcggcggacctgaagcgccgcgacaggctggcggaaaagcagagtgatggaacccaggtctggatcgcgccgcggaacttaaggtaagctccttgctattgcttttgtgatggcatggcgcacacgcacccgtgtggcctccaccataaaggccctgggcctccttgttctcctcgtctgtgcgggcggcgtacttcatgtagcgaaggtggtcctccgaagggttgtcatataggtgcctgtcccgaggaaaagcccaaaatcagccaggagaaggtcaacgcagaaggaagttgaatgacacaccgcttgacaaagtactgctcgtcttcgagctcgaggacgatcgcaaagacgacgagcaagcgctcgatgaccttggcgtgaatcttgcggccaaagtcgacgatctggtcccatttctgctcgatcggggccggcttgtgcgcggcatgccaggcgtcgaaccggggctcaaactttggcagattgaagacctcgacgttcctgcggcgctcgatcttgctgtggcgagcaaaaggggtgaaggcagtgtcggcaatggagcagagaggatgaatcggttgccaacgcacttgtcgacaaagtgcggtaggtcggcgccagtatatccatctacaggttgagaacattttagcttcggcagctttctggttcagccaccagcttcagtcgacgcactgtagcctccattcgcgtggtctgcagcatacttagcgcgctcctcgaacgggaggtcaaagacctgcgagggtaggcgtcggctacggttagcagggtaccctctcccattaatcgactaccttgggacacacctccttgccgatggcaaactgctcgtcgacagcgtcctgcgggatgccaaagtcggtgacgtagaagaagccgacgttgtgaacggccctgcgaggaggggagagacagccgacatcagcgccgcgccgtcaaagtgatccagctttaatgggatggcagagcgcaaaggtggcgcaccacttgagtttgtccgcgagcgcctgcttgcctccgggctgatcgaagaccgagaggtcgaggctgataagatccgcccaaggcactgcgtgcgatacgagctcgctggtcagagacgacgccgaagtaacatgacagggggcatggacgcacgatcctccttggtctcgggcagagtcgagtatgggtgctcggtcgtgccgtagatttggggctgggtcatcgtgagagcaagcaaggtgagactggaagggagggcgagctgagacaggcaggagatgtgagcgacccctgctgcccgctggcacccctcccgaccttaaggaggagccaggcagccatctcggccggctccgagcctgtcagctcagcaaagagaggacgagctatggtgcgggtctgtcagccgatggcgaacgacgtcggagggttggcgacgccgtcgtcggcaggcaagatggcgcccgagctcgtcttcgggcgtagccgatacgcgcgcgcgcagcagcacgtcactgcttgacacctctcttgaaacgccgaccgccgcccgcccttgtcgcattccaaagaaggtctatattgttatccagggagggaggcaaagcatacaaggtgaggaggaaagagtaaggacatcaggcgcggctagaggtcgcgatagcggaggacaaagttcgtaagcagggcggcggtgacgatcgcgccaaggacggtcggcccgacggcgtcgtggtactggaccgaatggcgctgaggaagggaccggaagaagttagcaacgtagtccgaggggagcaaggaggaggtaaggggaagggggcgacgtacgttcttgagagcgatggcgcggaacaggaacatgccggcagcgtaggcgacggcgacgagggcgcagaccgagaaggcaaaggccgagtacatgccggcgacgtcgtcgaccgagacaaagttgagcaggccggtcgagataccggcaaggatgacggcatagttgagccacttgaggaaggtgcgctgaggagaagccaggtacaaaagtaagggtcagcgagcactctcgccgtagacagcgagtcttaagccagctgtgacgcacctcgttcgcaaagatgaccttcggctcgatccggacggggaccgcaatccgcttgccctggggcgcgttgaagcggatcatctctggcggctggtcgtccgggtcgacgtcctcgccccgggcctcctcctcctcgcgctgagccttggtcttgaagagcttcgagaggccaaccttgtcgagcatcgatgagtagctcgcgtcatgctggcgcgagcccgatagcgggtcaatgtggaagctgttgggcccgttgccgcttttggcgaccgacggccgcttggtgatcggtgcggcggcagtgccgttctcgcccgcagcggcgcgggcctcggcctcacgccggagcttgtcctcgcggaaggcgcgggcctcgttgacgcgggcaatgacgttgtcgggcagcttgacctgcttggcctcgtcgaggccgccgaccatcttggtgtagacctcctcctcgccgtcgtcgtccgagacgggctcgttgtacggctgggcctcgatcgtccggggcgaggcgctggccgagtgcgagcccgatgacgtgttgctcccgccgggcgtgccctggtacggccggtggatctcgaccttgccgtagcgcgactgcttgcggatgtcgacgtccatctgcggcagccagaacgggacgagcgcgacccgctcaggcaagagcgtcgcgcagccgtggatgaactaccgagtcggcaacgggaaagcgagaacagcacggttagccagggggtcaggtgcgcctgaccgaatcgcgagggaagacgatgctcgccttggagaacttgggcacggcctcgacgagatgactgctgacgaggtcgcggacccactcgggcggctcctggcccatctgcgtctggagcttgacctcgaggacggcgtacgggaactcggtgtagtcgtccttgcggatgttggtgaagggcgggtcgatgccaacgtcgttgcgccgccagttgccgttcgtccggtcggttccgtcaaagttgtcctcacggacgagcgtgagctcggtgtcaagcgagatgcggacgcgggcgtcagccggcagctggaaggccgtccggttgtagaacgagcgcatcactggcagcgggaaaaggaagaagatgtccagccgtcagcagtcgggcgggcaaagagtaacgaggcagtcgggaaaacgcgacgcacccggccggagcttgcgcgtgtggacggcatactgaacctcgtttgcgagccgcttgaccttgtcgacgtcctcgggtttcttacccttttttcggccggcctcctcgagctgggcgtccattgtcatccggccggcgaggtagtcgttaagctcgccctccttgatgacgaagcgctccttgaccgacttctcgcccgtccagtcctcgcggtgcgtcttgcgctcgacgaagatctggaaggaggagggtgcgatgtggtcaaattgcggcgcgggcggatgcgcttctcccgtcgactgacctgcttgttgtcgagatcgccgtaccagcgcatgcggatcgcctcggcgccctccgtcttctcgagccggccgagatagagctcgagctcctcgttatcgtagtagatcgacgtgatggccgagtccgcgggctcaaactccttgttcgagtcgaagactgtgggcgagtcccgacggcatcagctcaaggacagcaaacgcacgctagaactgaagtggccgcaccaaggacaggcagatgcttgaggatgttgagcttgagctggacgatgttgtcgggatggacctggggaggcaaaaaagacgacggtcagtcacgatgcaggccccatcaatgagccatgagaagcagccaacgaacccagtacttggtcgtctgccggacaaaggcattttggctcccgcctgcgcccgagtcgccctcgaccgggtggccgcgcgtgcgaacaaggtcgtacagctttgacagtttgacaatgatcgcatcgtagttgtaccggtggaacggcgtcttctcgaggaactgatagtgagtgagagagagagagagaggagggcgtcaaaattggcagcgtcagtcagcgccggcaagcgaccgacgcacctcctgcgaaaagatgggcttgaggtcccaacccgtctgcttgtcgtgcttcttgacaatcttgatgaagccgctgcgacaggaagggccagcattagctcaagtgtccgaagaggactcaggctttgagcaggacggacgtgtagttgagcttcgtaaagagggcgaggtcatgcacgtcggcgacgaggatcgcaacgtcttcctcgagcgcccggaagcgctcctcgaccgcgtcgacgctgccggcgtcgctcccgccatcgctgcccgcgtcgtcgtcgcttccctcgtcgtcgtcgctcccgtcgtcgtcgccctcgccgcgtgagccggcaatgtggaacttggactgctgcgactcggggtcatcgggcgagccatcctcgagcaggatgtctgggtccgacgtcagacgagtgacgagccgctcagccgagcggatccggtgggcgagctccttggcctgaagagggaaggaagggcggtcgcgcgcaggaaggtcagtctcggcatttggcatgaaggcacggtctcgccctcctcccttgctcgacacacaccttgcggtcctggaatccggcaatcttctcgagctccatttcgagctcgcgcacaaactgggcctcgtccgtgtcgtcccattcgcgtcgattgccctgggcgtcctccgtctgcttcttgaggaacttcttgagccctttgtagtcgagatactgcgagatgagaaaggcaggagcgaggatatcagtcaccaaggcgagccgtacggcaggactcgagctgtgagcttgcttccggcaaggttcacgggcagctggggccagcatggcgatgctcgggagacgagggtgggatcacgcacgtagacctgccactctgggtagagcgacgactcgatccgctggccaaacttctgtagaggcggcactcgaccgggagaggaggacaagagggcagcgagtcgaagacgaagggcgcacgcgccggaggcggaggagggaagggccgcaggtgagacgaaaggggagggggaaggcgggtcagcgctggacggagcgaggaggcgctggcttggtctcaatttcagcgagacctggcttgcaacgaaatgaacgcaccatgatggagtgactagccgagagcgagaagggagggttaaggtagagggagggcggtgagggggaggacgaagagagcagccgaccgtttggcagagcccgagcaggcgaacgaccgtgcgtggccgcgcagtcagtcagcctgccatgtcgcattgacaagacctctctagccgcatggaccagcctccccgcgtgtcgggcgaccaatcgaccctcgacgacgacgacgacaacgactccgcccgcctgccatgatccactttctggcccaccacctggccgacaaagtctttggctcgcggctctcgctcggcctcctgttcgccgcggccggcgtcctctggctccggagctggctcggcgggacgaccaacacctgggagcgcgagtggcgcgggaagcgcgtgattgtcgtcgtgcgtccggtctagctgcggttgaccagcccagctcagacgaaaggaccggctgagctgacacctgcttgaacgtcgctcgtctagggtcctccgacagcgctgacactcgccctgctcgaccatctcgcctcgctttcggcaccgacactctacctcgcgccggccctccccccttcgctcgtcaccgtcctcgccgcgatccggcttcgtgcacccgcgacgaccgtcgtcgaaggcgccgacgagctcctgacggccgaggccgtcaacccgcgcgatcgcgctcaggtcctcgcgtttgtacgggcctgggcgaaccgggccgacggcgtgtcgggcagcggccggcgggtcgatgccgtcgtctgggcgtatggcgtcggctcggtcgcccaccctgcactcctgagcgatgccagctcaggcgtctcggacgagatcggcgggtccggcctcgagcttctcagcccgcaggaggaggagcgagcccgtttcctcttcttcacggccttcctccctcagatcctccacgccgtccagacgtcagcaatcaagagcctccggatcgtcgcccttgtcgaccctatctaccctgctggcttcaagacgtcgccacttttcgttccggtcgaagcgccggtgccagcgtccgcccctactcctgcggatgccgacccagacgcgacggcatggccagcggacgcacctgccgccggcggcgccgccgttccgtctgctgctggaccggtccagccggtcaaagccccctcggctgcggtcgcgcgcgcccatcatgcgctccggaccgtcgtcttcgtctctcacttccagaggatcctcgacgccctcgcgcgtgaaaacgaagcgctctcgacgatcccgcttccttcgggcgactcggcccagcccgcagccgcagccgcgacgacgcatggcgaggcaacgggcgagacgctcgagcccacgccagcgaagcaggtcaaggaggagcggcggtcggccgtccttgtcgcagccgtcagccccggctggcacttctcgtcggtcctctggccgttcctcgctcgacagtcgccggggtctttgctcgtgccgaccctgtgcgtcctcatagtgcgccatcgctccctttcgtttcctttgctgaccgcttggctccgatgcaggtggaacgctactctcccgctacgcgcgctcgtcgctccttcggccagacagagcgtgcagagcgtgctctttgccctctcggcgccgccggaagccgtcggctggggcagcgtcatcaaggactgtctgcgggtttggtgcgtggccatcccgtcgtcatcaccctcgcgatatttgccaggagctgaccctcctccccgcatcacagggtcccgccgtcgctggtcaaggacgagaagctcggccggcaagtctgggaggagatggaggcgagtctgctcgaaggagcgagggagggcagccttccggggccggcgtcggacgagagcaaaaagagctgatagcgcatgatatctgtcgaaagcgtgggccgatctgcgtccactgagcgtcaccctgagcaagcgaatgatctcaatcgtgcatcttgtggtaggcccgttcgccgtcggcggccggcgactcgtcgtgcctgtcaagtcgtcgctcgcccgctcagccaccgacggcttttgcccctattccgccgtgttgcaagcgacccctctctccgtccgaatcgggcaggcaggcgagcgcgcctcctctcgcttgctactgctgctgccacaggagcgctcgcccggttttcgcagcggcctctccccctcgatgaccgacaacgacctccccttcctccctgcccgacgacctcacgacctctccctgcctcacgcccgtgctacgaccgctcctcagcccaacgtcctcgcgccctccctttcatcacgcttcatcaacagcctgcttccagccgctcggtccgacctcctctctctccctcgcccacctcttttccctttttccgcttgcccttcaagatgtggtgcgatggctgctgcctgctcttccccctccgggttggcgccctcgtctggaacgtcgtcatcctcctctactcggccgtcggcggctacctcctcgttacgtacggcggcttctggtgagaagactgctcgtcacggctgcctcccgttagctctccggctgaacgcccccctccgacatttcgcccaggttcttcacgtatccggagcagtgcgtcctcattctgatcgctcgcgagggttcgcctgctgaccccatccgttccttcgcagctacatctatggcggcgtccgtccttttgctctccgtcgcgtgagcctgcagcaagggatgacctttgctcttctcccccgtccaggtggcctttgccgtcgccgctatcgccgccgtctcagtcctcgcgctcgccaatcgctcctacgtcttcacgcgggccatgcttttctgctggccgatcatcctcgtcgccagcggcgtccgaggtgagcagcaacgctatgtcttgactcgagatcccaggctgactgcttctttccccccggcaggcatcctcatgatctaccagttgcaacgcaagcaagacaacatccaagtgcgtcagatcacccagtgtgtctgtcctcatcctgaccgtccgacctctcgcagtgggagtgcgacaacggcggcaagcagtggatggtcgaagccacggtcaacggtaccgtgtccagcacgtccgccaccctgcctgctggtacatcccccctcgcccgccagcttgctagctgtagccaggctgaccgctctcgactgtggctttggcgacggcagccttctgccatggcggcgcgacgaccttctaccaggccatgtttgtcgcgctcatcattgacctcggtttccagctctacgcgttcgtccttccctctccctctcgtaatcttcagagcctgactgttggagccgctcgctcatcagcgccttcatgacctggcgctactcggcgttcctgcgccaataccgcaaggtgcagggccctcagatgggtgagtcgaccgcctccctatcgtgtctctcttggtccagctcctgacagagcgtcctcgatcaaggctactacgcctagtcgaactcgtacgactctcccagctccctctccatcgcgccaccccttgcactttgtgagtgctgctgcacctcatctcagccttcgatacacgctgacccgcgacgctcgcctcgcagacgctgcctcacgacctaatgcaccgcgccacctcctctcacgaacgctcttgcccctcggattatcatgacccttctcacgaaagactgctagtcgatgctgaaaggagtttgatgacgttcatccgtcgaggcggagggcctcagcgactgcgcgcgtcctggtcggcgccacttcttccgacagcccagccttgttcctccgacgtggacagcctccgcttcctctcatctcgatagccgcacgcttctcttctaccagcagctcttccgctgtgagcacagcttgagaacaaggtacacggttgcgccgatgggctgaccgtgcagctccacttgcccgctcctcgccgacctgcagccctcccgacctcggctcgtcaactgtacgtcggttgacgctgcctcgctgcaacagccgcaagttacagctgaccttgcatcggcccttcagatcggtcatgcgtgtccttactctctgcggctacgtccagaatgcgtctatcttgagcaagcggatgggcgccctgcgcaagacgtgcaaggacgtcgagttcggtgcgcatcctctcgcccgagctgcagccgcacgtctgcaacggcagctgacgtccgttctccttcttaatcgcacccagtcttcatcgacgtgagatcgatcttcttgcggcctgggccgcgtcccgtcctgagctagcagcgagctcacacctcttcctctgctcgcgtgacctcaccctccgcagccgccgcacatcgtcctcaatccgaccttcggcacctcgatctcggactttgactcgtcggcggcgaccaacttggaggagatgacgcccgagacgacgccccgcagctggtgggagtcgggcgggcccaataaggacgtttacgaaggctttgacgcgagcgtcgagaagctgcgcgaggtcctggagaacgacgagcaaggcttcgacggcgttatgggtttctcacaggtccgtcagcaatcctccaggagcctcatcaaccgagtgacgctgactgttgtgctccttcggaccggcagggcgcaggtctcgcggcactcttgacctcgctgctcgagcggccgcagctccaccctgctttcgccggcaagcgggcgatcccgccgttcaagtttgcgatcctcgttggcggcttcctcccgacaccgcgcgtgcccgacctgacaaagtggttcccgatcgagacgccgacgctgcacatcattggcaaggtcgacgtcatcatctcgaccgagcgcagtcttgcgctcgtcgacaagtgcgatgatgcccgcgtcgagtaccacgacggcgggcactttgtcccgtccaagggcgccttccgcaacttcttccgcgactacattggctcatttgtcgagggcggactccagggcgacgtcccgcctccgtcgagtgcgccggccacacccgggccgagtgcgccgcagacgcgagaggccacgccggaaaagtaacacggaggtctttacgcatctttttccgaacgagcgaccactcggcccgccgacagcttgagaaccttgcctaaaagagtcggagacgtcgggtcagctttgtctagaaggctagatgcgcaagacggaccttctgcctcagcccatggtcgctcctcgatccagtgtccgacccaaatgacggcagatcttcttccgagccgtctcaggtaggccttgcaacgctcgatctggtcgtcctccatgaaggcaaagggctcgtcgaggatgacgagtttcggctcgttcacgaccgcccggcagaagaggacgagtgactggtcggccggcgagagggacgcaaacgactccgtcttccaggcctgaggctggcgatccggccaaaaattggcaagaagctcgtcgacccgggcgacctgcgcaggtgtgaggttccgtcgcgagaagatgccctcgaagcccgtgccgacagcctcagcgacagtgaggatcgtccgagggaacgacttaaaaatttcgggagacgtgtggccgatgagggcgttcagcgtcggcgtcggcgtcgctcggcgcggcttgctaaacagctgaagcgactcggccggaagcgagaatgaccgcgggtgttcgccgagcagaagcgctagcagggtcgtcttccccgagcctgaaagaggattctgtcgtcagcaggaggttcagccgattagagccgcgtcaggcgtaccgttatggccctgcagatgccagcggtcgccagtcttgatgctccacgagatctcgtcaagaaccttatttgagcaaatttcaagtcagcaggtcgaagacggtcagcggcgctcagacagacgcaccttcttcgttccgtaagagacgtcgacctcgtgcatgcggacgacttcgttgcccgcctggtcgctactggagatcttggccgtctcctcattggcagaggccgccgaccgccgctcctgccaccatgccttctcggcgccacgctcgccaattcgcaacttaccatctcccgtcgcttcggcgacatgcgtcacccacgccggcacgtcctcaccgccgcgcagcacgagcaggacccggacaccctcagcctggaggccgcccaacatggccgccatctcggtccggccctccggatcaaggccggcaaagggctcctcgacgatcagcagctttggcgaatgcaagagcgccatcgccatccgcgcacgacgggtctggccgttcgagaggccgacaaaggggacgtcgagcagatgctcgatcccaaccttgcgtgcgaccgcccgcgcctcggccgcaccacgcttgccgccagtcaaggggtctccagggtcggcaatgaagagcagcttttcgagaagcgtaagaacgtcgtcctcgtgcagggcgccgtatctcgcggtataattctggaattcgcccgacgccggcggctgggcgaacaagagatgcttgatcgccggcacggtcgacggcggcagcgaggccaggaaaggatgccggccaggaggcggtaccggcggatccaagcgatggtggccctggacgacctgtggagatgggaagaaggccttgagtgaggacgctcggagggagcagctggtcgcctgcgcggctgttgggagcacggacctcgatgagatcctttcgacctttccccgagccgacgatggcccatcgctcgcgctcgtccatcgtccagctgacgtccttgaagagagcccgaccggccgcgaaggagccgtagcggtagaccgatgtcctcggagggacgctgaacgttgccgacatcgctggcgcagccctggctggagctgctgccgccgatgagaaggtgcgctgggcgcagaccaagaccggcctgacctgtagcgcgtgcacaggaccaataacgagacgcatcatggcgtgcgaggaggtgctgcttgagcccgtcaaatcgagatggccttcagctgggagcgtcggagtcggccgggcttcacttgacgccgcaggagacgcacgcacctcttgccctgaccgccgaccttcaccttcctgcacccccctgtcgaccgtcctcctccactacagacgacccagccatgaaggcctactactacgacaacctcgagtacggctgcctgtatcatcgtttgagagtgcttggctttaactgacgcccgaggatccttctttcgctcgtcatcttccagaggcgaccagcgcctgccgcacaacgctggcgaggacgtcacgcctgctcggctggaggagctcggtctcttccaccgtcagatcgctgttgccggccgggccgaggctgactggcttgcagacatcggtcagtccggctggacaggacctgtcttgctgtcggctgagcccgaggcgagaagacgactgacgtgctttcgccaactgcgccattggcctggcctctccagacgaggttgctcgggagcgcgactacaagaaccgggacgtcatcaacgtctcgaaggcaggactgggcgacatctacgaggagaagatcaaggtatgcttggggcgctcgccgggctcttgcgcgcaagggagttgaggctgacaacgccaacgtgcctcgctctcgcagtcgttcttccacgagcacctgcacgaggatgaagagatccgcttcatccttgagggctctggctactttgacgtcaagacgccgccggatgaggacgaccgctggattcgagttgcactggaggccggcgacctgctcgtcctgccgccaggagtacgtcgagtcgagctgctcgagaagcgccccccgcgccaaccaagacgccagtgctgattcacaggcctcgctcctctttcgccagatctaccaccgattcacgctcgactcgaccaacgccatcaaggcgatgcggctgttcaaggacgagccaaagtggacgccgtacaaccgctcggatgaggtcgacggtaacccgtaccgcaaggagtacctcgctggcctgaagaagccgacgacgagcgtttgatggggctcaggctatagcgatgaccgttgtacgacctaccggcgccggcgcctcttccggcgcagtcttggtgccgacccgtctcgcgagtgtccaaccaatctacatgcccagtcgctcttgatcggacccaacccagcctgccttacactcgacgtcgatccgaggggcaagcacatcgtctcaaccctcagccgactcaagcaatctccgtcatctcctgcccttccgtccgtaaccggcaagccatctcccgtccagtctaggctttcgcagggagagctttaaagctcctcctcgttgtaccaccagctggatcgacggtcgtgagaaatgagtggtcagtatgagagctggccgagtgagcaagtgagcgaggcggcgagcgggcggacgcacaggtgcttcttctgcttggagctgcggagggaacacagcgaacggtttgacgtcagcaacggctcaaactcggccagtgaatgcaaggaacgagaccgacagctggtactgtggggcagagtgaacgaagaggaggccgtcagcataccatgccgtcaaacgcgcgacccggcgcgaaggatcaggttgaacgcacctgccaaacgccgaaggggagcgagaagctgaaggtcggcaggctcgcgtcagcaccacaatctggagggatcactatctgtcaggagcgacgtacaaggcgccgcaggtgccgagcatgaggacgttgaagagaaccgggcggcgaacggcgaagccctggaacggccacgactgcgaggaggatcgaagccggaatcgggacatgcgtcagctgacgtatcgctgcaacagaaagagctgtcgaaagagctcacggtctgttgtcggcagcagcgaggcgagcgagcagcgggcaagcgaagggcgagacaaacacgcagcggaagcgcagatcgtcagcgaagggtcggcaagctcgtattaaacgacaccatcgggaaatgacgcacataggcactgatggcgtagcgcaggcggatcgcagacgaggaggaggggtcagcagctgtaggtcggtcgaccggagcaggtggcccccatctggccacaggctgaagctcgcagccgatgcgaggctgctagtaaggagagggcgtacgtgctgggacggaggcaagcgcgataggtcgaccaggtcagcaagctggacagctgatgaacaaaggcccggccggagcaaggggagcgcaggctccaggttgagagcactcacttcctgttggttgggccggtcggatgacacaggagcaatgcaaggcacgaggcaagccagaaagagatcggagggtcagcagcggccctcgagcacatccgcagcagcaatatgtcaaagggacttgctcgaagtgcctaccgggtggatcgggaggtcacagcgaggtcgaaggagagcgaatggagcggtggtcagttggcgaggtgctgctggctcgagcagcagcttcgggcggcggtggggactcgctggatcgcgtccgggttggtggaagccgagcggcgaccgacggtctggcgaacgaggcgggcggcgggtcgggcgaacatgctgaggagacgggtgaaggggtgagaggaggtgcaggtcaggccaagcttggcttccggggggcgaggcgtcgtccctccgagctcgcgcccgcgcgtgcggagcggcggcgggggaattgatgaatgctcgagttgaattcatctatcgtcgcactgctggcttccgcccctgcaggcgaacgccgtgctccaaccctcatcctcctttctgtgctgcagcagccgatcccggggctgatgagatgcgaggctgacgactgaacgttgaccgtcgggagtgacgatgaggctcactgatctccaggctgctgactgggctgcatgctgaccggtccgacaccgagcagccttgacctcctcgtcatctttcgctttcgacagtgcgatcatatcaggggtcagataccgctcttaagctgctcgtcgttcatctaggcaaggcggaagacccgtacgatggaagtgagatgggctgttcggcttaaagccatcaagtatgccgagcctcctcgtcacccgggcaccagccgacgtaccgccgacgcagcagcagtctgtcagtcacttttactggaggtactctcgtttatgtcgatgtcatgtatctttgaccgagtctgctcaggtgcaggaaaggagaggcggcgctcgcgcgcagtcgccacctttggcgctctggcaagagacggctgccgatccttcacagctcgttcctgcaactagagtgccagcatgggtcacgactgtccatctattcttgctacctcatcttttggacaggcaacgggctgccagccgacgttcgttcagtcgtcgccaggggctgtcacctcgtgagcgcctgcgtcgttttggcctgcgcggcgggcgcgcgcttttggcacttggcctgccctggctggctaccgacgacgagctttctcctcctcctccttccagctctccaacctctctcctcgacgcagcttgtcctcaagacacgcagcataagcctcggccggccgactttccctccagcttcgagcaagctcccgacgtccggacgtccaaagcggctcgatccctccttccctcgctctcccgcgccgccgagcgcgcaggcgccccctccctccgtccgccctcccgcccttctcacctcgccagcggactatcgcctaggatgctgcccccgctgctcctgtcgcttgctctctggctcggactcgccactgcggcgccatacgacgcccggtgggccgactacaacatgaacaccaacccaggtccgtccttgtctccccttggctgccctttcatcacacgcgccgccgcccgctgccggctccgacctgctgccaggcgaactctgcctttcgccatcggcagtcgagccggaccctagctctggcagcatctcctctcgccgccgagaaaaaacaggcgtgccgccgtagcctccgacccaagtgttgcggaaccgacagagagtcaagcagagtgcggggcagcggcgctcggcgcggctcggcggtgcggctggcgggctggctcggctgcaacgctcgtcgagccgttgtcgaggcagggtctggtcgatcttgcggccactctcagagcggaaaaggtggcgcccgctctatgagctcgagcaggctgcgtgcgagggttacaaaggggggagcttggctcgggcctcgcgccgcgggcgcgcctgacttcccttgtccgctcgacgagtctcgtccacccccgtcgacaagcgccagtcctaacggcttctttcttgcaacgcagacccgaacgcgacggtcctcgacttcacgacgcgcaaattcagcaccggcaacgactactttccgtcgccgaccaactggcggtgcgtcctgcctccgtggcctcgcccactgtcgggtccacccgctgacctgtcctgcccggccgctcacaggcaacatcccgtttacacagtccttctcgacaagcactttgatgccgtgcccgagaacaacgactactttcacacgctcttcgagtggtcgaacaccgagacgcaggtccggcacggcggcgacatcaccggcctcgttaacgaccgctcgctcgactacatgcagctgatgggcatcaaggccatttttgtctctggcacgccgttcctgtgcgtctcatcgggcgctcgctctcgctcgtgtgatgctgcctttggcctttgctgaccgtgaacctcctcgtctcgcgccccgcagcaatatgccatggcaggccgacggctactcggcgctcgacttcacactcagtcagtgccctcgacgcctcttgctcggcctttcttgccacgactgacctcccattgcctcccgacagtcgacccgcactggggtaccgttcaggagtgggccgacgcgatccacaagatgcacgagcgcggcatgtacttcttcgttgacttgaccattacgacgatgggcaacctcattgtccccaaggagtaagctctctttgtctctcggcgacaaagtgcaacagctgacgcgcctacttctgagcgcagctacatgaacaactcggcgcccttcaatatgaacgagtgtaaggccctctcgtctccttctttcgcactcgctgcggcctcggtgaactaaattgaattctcttctctccttgcagacgaggtcacctggaaccgagccccttacggaccgtggaacatcgtacgtctccacgagctcgctcccggacgccccctgcctgacagcgttctcccccttccgtcgccagaccgagtaccctgacttcaagttcaacaacgttcacaacgagtcgtgcgagtaccctcagttctgggactcggagggccggccgcaggcgatcccgaaagaaaagggctgcatggcgagcgactttgaccagtacggcgacatggaggctttcggcatccagttcagtcccttttgacttctgcgtactcgccgacccgtgtgaccgcgtcgtgctgacaccgtttcgctcttgtagccccgactggcagcgtcagctcaccaaattctcgtcggttcaagaccggctgcgcgacttcaaccccaaggtcaaggacgagctcatccacctgtcgtgccttctcgtcgaggcgctcgacgtcgacggctatcgaatcgacaagggcacccagctcaccgtcgacttcgttgccaagtggagcaacggcacgcgggcctgcgcgcgcgagctcggcaagaccaacttcatgatcaccggcgagattactggcggcgaccgtgcgcagccgtctttcttccctagccctcgaaggcgacgactgacgtgcatttccctttcctctttacagagtctggcgcgctctatattggtcgcggcacgtcgcaggccgtcaataaccggacgctcgatcaggcactcgctgcaacgccgaccgacaacaacatgtacctccgcgaggacggcatgaccggctacgacggcaccgccttccactactctgtctaccgcgtcctccagcggctgctccagatggacggcaacctcgacgtcgcctacgacgtcccgaatgagctgacgaccatgtggcagacgatgctcatcaacgaggatctcattaactcgcagaccaaggagctcgacccgcgcaactgggttcggcccttcgtcggctcctcctgcctcctcgagaccctgccccgctgacctgctctctccctctcgcagatggcgatgaccaaccacgacatctttcgctggccgtcgctcgtcaacggcacccagcgccaggccttcggccagtacgtcaccttcctcctgatcccgggcgtgcccctcgtctactacggcgaggagcagtcgatgtatatctttgacaacacggcggcggtgagtccctttgagctccgtctgaccgtcggagcacgcgctgacaacacccgccgccccgacgccagaattacctcttcggccggcaggcgatgacggcgacaccggcctggcagcgtcatggctgctacaagctcggctcgacccagtaccacaactttgagtacggaaaagcgctttttggctgcgacgacttctcgcagcagctcgaccactttgatccaacggccgattacttccgcttccttcaccgcgtcttcaacctccgcgacacgtatccgtcgctcatggacggctttcagctcgccaatcagtcgatccacacgtactttgtccaattcccgggctccaacaacacccagaccgagattggcctccggtccatgtcgcgggagccggcgccgaggcagctcaacgaccccgagttcctgaccgacatggcgacgcccgtctggtgcgtttggctgcttcgctgcccgccgtcgcgcccttcgactgacgctctctttccgccgcccgacaggatgctctggcacaacgagaataagacgacgacctacaactttgtgtgcggtggcgagaacgaccaatggatccggtcgccctacccggcgccggtgacagtcaaaaacctcttctacccgtacgactcggtcgcacttgagccctcgtcctggagtttcaaccagaacggcgaggcgccctaccgtggctggtgcgtctgcaggcccttgctcggccgtctttgatcctttctgctgacttcatcctcggtccatagcatgcggacgatcaccctcaagccctactcgtttggcgcctacgtcccggtcgacgtctggtacccgccgccgccgacgatgacccacttctctccgggccacgacgcccggctgctgacaatccccggcgcggccaacgagacctcgttcgacatctcgttcgagtacgaccgcgagatgaactggtgcgtcacctccggttcgggagaaacgtcgtcgtccgcgctctgactgacccttgcatgctataacttaccccctcgcagcgactcgctccaggtcagactctactttacgggcgcccccggctccaacgcgcagccgaccgtcggccgcggcgtctgcgggatgcgcgacctcgtcggccaggtgccgaccgagctcgacaatgtcgcgccctcggcctggaagtggacggcgaccgtcaccaatgccgccgatggcatttacgagtttgtcgtcggcaacgtctcgacattcccggcgtctgactattctggcgcgccggcccacctgctcgtccgcaagggacggtcagataacgtcatggtcttcaccgaggcggccgactacaacgatcagctcttgctcggctcgcccggctcgtacaagctcaacaacactgccgtcggtgccgacctgatgcgctactctggcacctacggcgtcaactggaccgactggatgcgctacgagaccgaggtcgacctgcccgacagcgtctttgagggcaagttctgggacggccagcacatccaggtccagtaccacagcaatgtctcgggctcgtcggcgccgatggtccagggcgacctcgactttaccggcggccagcggcgcttcccaaagctgctcgcccggggcgacttcaaccagtttggctacgaccagggcgtacaagccgacctcgaacagaagggcaccaagggcgagtggcagctgccgctcatgtcgttctggccgtcgtcggtccagctctcggtctacggttacgacgactttttcctcggcgacaccgacggcgacggcgtgctcgaccggctcccgcctaactcgctctcgtccaacttcctcaacatgacggccccgcctaagcacgcgctcggctggacgcttctcgtcaacgaccacaccggccgatggacgctccagccgcgcggccactcttgggtctcgcttgtctgctggatctttctcatcatcatcccgcccctaacggccctcatcacggccgcgagcttccgcaagcgcttctacgccatcaagatcaataagtatggcgtcaaggccgccaagggcggctacaaggagaccgagaaggacgcccgcctcgccgacggccagaaggtcatcggctggcccgaggacccggttcgtcccctgcgccccgacctctcgctggaggcaccggagctgaccgtcctctgcccgcacagaacaagcggcgcaagatcattattgcgacgctcgagtacgagatcctcgactggaagatcaaggtcaagattggcggtctcggcgtcatgtcgaagctgatgggttcgtcccttttcttccgcaagcgcaacctcgggtgctaacctggacgttccctctgacgctctggcaggcacggcgatggaggactgcgacctcgtctgggtcatccccaaggtcggcggcgtcgactacccggccggcgagtcgaccgagccgatcgaggtcatcatctttggcgagccctacctgatcgagtgcgagatccacgtcttcaagaacatcacctactatatcctcgattcgcccgtctttcgggcccagaccaagtcggatccgtacccggcccggatggacgacctctcgtcggccgtgttctactcgacctggaaccaggcgatcgccgaggtcatccgccgcaacccgatcgtcgacatttaccacatcaacgactaccacggcacgctcgccccgctctacctcctgcccaagatctttccgacctgcctctcgctccacaatgcagagttccagggcctctggccgctccgcaacaaggaggagatgaacgaggtttgcgctgccttcaatctgcccaaagaggtgacgaccaaggtgagcctctcgcgcccctcctctgacattcgggccggggctgacccctcgccatccccgcccgccctcgcagtacgtcatgtacggcaacacgtttaacctcctgcacgccggcgcggcctttatcgctcatcaccaaaagtcgatcggcgtcgccggcgtctcagacaagtacggcaagcggtcgtgggcgcgctacccggcgctctggatcctcaagcacatcgactcgctcccgaacccggacccggacgacattgacgcgctcgacgagcaggtgaccgacgtcaaaaacatccaaattgaccgcgcggccgaggccaagcgaccgggcctcaagcgccaggcccaggagtgggccggcatcgacctcctgcccgacgcccagctcttcgtcttcgtcggccgctggtccaagcagaagggagtcgacatcatcgccgacgtcttcccggcgcttctcgaaaagaaccgcaagattcagctgatcgccgtcggccccgtcatcgacctatacggccggttcgcggccgagaagctcgcccggctcatggagatgtaccccaagcaggtcttttcgaagcccgagttcacctcgctcccgccgtacctattctcgggcgccgactttgcgctgatcccgtcgcgtgacgagcccttcggtctcgtcgccgtcgagttcggccgcaagggcgcgctcggcgtcggcgcccggctcggaggtctcggtctcatgccaggatgggtgcgtcttgcgcgacggagtctgtgcgctcgctcgctcgctgatcgtctctctccgccgtctcgctctcagtggttcccggtcgagtcgatcagcacgagccacatgatttcgcagctgcagaagacgatcgtcggtcctcttccctggtcgccaaggcctctgcagacgagactgaccaccctgctcgcctggctcagaaactcgcgctcaagagcaccgagcaggagcgcgccgttcttcgcgctcggtcggccgtccaacggtgaggaccgcgatatttacctgtatctggcgcacgaagctgaacctgcttctcttccacaggttccccgttatcgagtggcgtcagcggaccgagatcctgcagaagcgctcgatccgggcctcgcgcaaggaggccggctcgcacgcgtacgactacagcgactacgcgccgccggcacacgtcggccgaggcgtcgcctacggcgatccgacccagattgagcgccaggagtggatgcagcggccggcgatggaggacccgcacgcctcgtttgagacgggctcgatccgcaacgcacccgaggtcaacgacccttacgatccgagccggacgtacgacgagaacgcccacccgcgcccacgccgcttcggagacgacgacggctcgctccgtggctcgccctcggcctccgactaccacgactcgccctactttgaggacgacggccacccggcctacccgcagcacggcgaggtaccgagctttgagcgcatggctggcgaccggtcgtcgtcgtacgaccactttctcgactcggccaaccggcagattgcgcgccagcagcggggcacccaggatccgttcttcacggcttcgtcccgcgggagcatcgccgacgacgggagcgacctcgttgcgcccaaccggccgttcacgatgcacagccggcgctcgtcggcggcgagcatctcgtcgatcgtcgacgagcacggctcgtcgtcgccactcaacaaggcgatggagacttttaccgacgccaacggcgtcgtcgcccaggactttgttcagaagctcaagcacctcgactcggccaactcaaagggcgacctctgcatcgagaagtatctcgagattgccgagaagcagcacttcaaggagctccggcgcgagaagatcgagacgtcaaaggcctctggctacactccctcgctctacacggccgaggacgacgagaacctgatgcccgagattccgatgacgcgcatgcagtcagtcgtccccacgaccgttcgctcggtgcccgaagctgactttctttctcgccgccgccgccgcagaatcttcatgggccgccaggttggtgagtggccgttctactcgatcgtcatgtcggccggccagctcctgtcggcgtcggcgttccagctcgttctgctctcgggcacggcctcgcagaccgacctcgacctctacgtcattggcgccgtctttttcacggcgacaatcgtctggtggagcatcttccggacccagccctcgtcctgggggctctcgttcccctggctcttcttcgcgctcgccttcttcctcatcggcctgccctcgctccacggcccgtttacggccgtccagacgcacctccaggcggctgcgacctggtgctacgcgattgcctcggccgccgccttcctcttctttggcatgaacttcggcgaggaggctggtgcgacgacccagtcgtggatcttccgcgcctgcgtcgtccagggcctccagcagtgctgggcggctatcctgtggtggtggggctcgctcctcatcaacaacgaccccgagacctacatcgcgccccgggcgattctcgccgtcgtctggccgctctccatcgtctcgttcctcttcttctttgcgctctggttcggcttgccccagtactacctccagcggccgccgacggtgcccaacttctacgcgacccttttccggcgcgacattgtccgctggttcctcgtcgccgagattctccgaggtcggtttcgacctcttacccctgctctgatctctcgcgcgcctgtcgctgaccctgaccttcgctcgcagacttctggctcgcgccgcccgtcggccgcaactggaaattcctatggtcgaacccgggcgtaccggtctgggccgtctttatcctcgtcctcgtctttttcatcggcgtctgggcgcttgtcctcctgaccctgacgcggtacgccaaaatccattcttggctcctgcccgtctttgcgatcggcctcggcgcgcctcgctggtgccagatgttctggtccctcaccggcgtcggccacaacctcgcttgggccggctcgtttggcccgttcctctcggtcgcaacctggctctggcttggcgtcctcgatgccgtccagggtgtcggcctcggcatggccctcctccagacgctctcgcgatttcacggtgcgtcttgagccccttcagtcctcttgatcgccgagctgatcttgcatcgcgccttcagtcaacgctgccctgatgttctgccagtgtcttggctcgattatggtcatcctcgctcggctcggctcgccggaccgggtaagtctccgatctgccgcccgcagcaaagccagcaacatctgaccctcccccgccttcccctgctgcagctcggcccgtacacggtcttcccgaactttgccctttgggaccgggtgctggatggcctgatcggcatgccgctcggctacccgctgttctggatatgcctcttctgtcagatcctcattgtcgtcggctgtacgtctcacctttttttctcatcctgcctcgaaccccagctgacctatcaacttttcaccgcgcgcagacctctggctcttccgcaaggagcagctgaacaagcgtacgtccttgcgcgcccgttgtagccgctccattcgtctctacatgcatgctgaccggttgcgctgcccccctgctttcacttcagcttgatggcctcagtccgtcgacggctggccacgcacctccttttctcctctttgttttctgctcgcttccttccgcgtctgcaaagtgcagcgcactgtctctctatcagggtccagcaaaacactcccatgtcccgctccctccttcgactacccttagaagtccgtcagcatccctccctcactcaatcgcttacccggcgcgctggcccgaggtctgtacgctctcgctcgccgtaggacgggatgatggaagactcgacgatgccatggtgattgcgaggcaaagagggccgggtcggcagggttaggcaggctacaatggaccagagtgagaagagtcagagagaagccagagtggtagagagggtgagagcagggcaggggagcgatgcggtcatgcaaagggaggggagcgggcgttgtaaggaaggggagaaaatgagcgagcactacgcagtctactcggtgataagcgggccgttggcgcagacaaagccgaggtggtcgagctcgtcctgggggagcgtcgtcgggtcgcagataacggtgatcgacttctggttcgaggcgacaaagggcccaatgttctcgaacttgaggcccgagaccgtcttgagctggtcgaggacgagcatgacggcctgggtgccgtcggcgccctcgacatagttccagcacgggtccgtgacgcaggtggcgtccgagagcttgggcgcgagcgagtcaatgtcgccccagaagttgcggaacgtcaggtcggtaatctcggtcgactggttcttggcgtccttaggcgggccgaactgctggtcgaagtagctctgaggcagggagggcaagagcgcgggtcagcagcgcgcaggtcgacagcggaggagtgagagcagggacgcacctgcgtgacaaagatcggctggatgacctcgcgcgactcgatgttctcccaggtgatgttgcggccccagccggcgccgccgacccacgacttgaagcgggccgcgtacgttgacttctcgatcttgacgtcgcggatgatgatgttctggacggtcgtgttggcgccgtccttgccgagcgagccaaccgagaggccgtgcgtgccgcggcagtaggcgttgcggaagaggaggtcgtcggccttgttgttgatggcgacgcagtcgtcgccgccgtagacgaccgaattctcaatcagcgtgtgctggctcttgatgttgaagccgtccgtgttgaacgggaacgaggccgtgttgttcgagacgccgtagatgaaggtgctgcgagggaggagagggtcagccggcgcagacgcagaaacagagggggcgagacgcacttgttgacatagttgtcctcgccgaggagcgcaatgttccacgcaatctgcttgtggatcttcaggtcgaggagcgagccccgcttgacgtcaaacgccatcgtctggggccggttggcagagaggtcgttgttggtgtagctgggagaggagcaggcaggacggtcagtgagcgcgcgaaaggatagatgaggaagaggaggaggcccacttggtcgactcgatgtcccaccctgtgaagagagagaacaggaagaggagatgatatcagtcgctgaaggacgggtcctgaaagggaagcagagtcggacgcacactgctggccgaagcacgagatccagcccatgccggcgtcgtggctgccctggatcgtgacgtcctcgcctgagaactgcatgtaggccttaccgtacgaggcgaacctgggtaggagggccgggcagtcagcaaaagggcgaaaggaaggacgaaagagaggagaagcgacgcacttggtgatgttggcgacctggcgctggatgagctcgcggtcctcggggaagttgaggttgccgtcgatggcgacgtggacgttcgacatgttctggagctcgaacggcgaccactgcgaggcgaggagggggaggagagtcaattgccgagcgaaagaggcaaagcgagaacgacgggcggacgcacaatgttgtacgtcgtgttggcagcgaagacaatcttcgagttttggtggccgcacgagttgtaggtcgcgatcaagttgggcgtgtcgtcctggccgtccgtgtgcgggacgacacactcgttggtcgtgtccttggcgccaaacttggagtacatctgcgtgtagtagtcgtggccgccgtcggtgtgagcgacctcggcatgcttgtcgttgttgcgcttctcggcgagtgtgagagccgggccctcaaatggccgcgcaaaggcgacggtcgaggcggcgagcgcgaggacggcaaaggaagccatcgtgggtcgaggagctggaggacccagagagcgaaggggacgggtcagcgagcccagccgataaagtagcgagggaagagagcgacgcacgagaaggggttaagagagctggagggagatgcggtggcgagagggaagcccgagcgaggacgatcttatatcctgccctagacggccggccggctggtgagcggctcgactgcgcccgaggaaagcgctgctgcgacccggtcccagaggctctcgcgaagggtcataggatccaagcgtgtttggtggccgggcgttcggacggtcggctctctagcagcagttggcgagcttgaagacaggtggggtggctcggtgtgatgtggctggggaagcaaggcgcgcgcggtggaggcgcgcgaagccgggcccgggccgggcacgagccgcaagccggtagtggggttttgagccgaccagccgggccacgcggtcgtcgtccagcccgcaggcgagagagagccctgcgcgatgcaaggtaagccgatcagcgtggatgcaagccaagaactgatgaggttggtcgaggctcacccggttgacgacccgcgggcatccggcgcagcagtaacggagctcgacgccgttgagctgccgcggcgtcgctcgctcccctcttcctctcgcggacccagtagcggcgtcacgtcgcggcgtcggtggtgagggtccgacgacgggccaggtcgaccgacagcttgcaaagttgcacaggccgggcaagggctcaagccaagagggcgaggagatcgccgaagatgggtcgattgagctccgcgagctcgcgcacctgagcctgagaggtcgtcgaggtcagctcagctctgcgaggtgcgagcctgtctagacgcacctctagctcgggcgagcagcgttgcacggttctcaagagctggccgaccagccgcttgagctcggcgaactcatcggccccgtctgccgatgcgcgccatggacccgaggtcagcgacgacgagctctcgcagctgggcagaaggcacgcacctcgaccggcctctggcaagatctctgcttccctgacaccgacccacatccggcccgtgccgttcagcactgcgcctcgccattctgcgaccctgctcgcgccctcgttactggcgacgacgagcattgcgtcgatcgcccgaaggacgtccatgccgaaggccctcgaccggctgctggtgaaggtgagctcacccatcgggaccagcaacgacgagaggagaggcccaaggtagcgaacggtcccgatcgagccgagcgcggaccagagtgtgccggtcgccagccagctggcaatctcgcgagcctcgggtccgagctcgccgccctcgcggtaggtgtagatcgagatgatgcccttgtcgatgagctcgtcgacggcccgcgaccgctcggccgagttgggctcatatagcagggtcgccagtgacaggtgtgtccacagcgaggtcgagtgaagcgatggcagcgggtcgtcggtcgagttcggcaggaggagcaaggtgcttaaggactgccagggtgagtagcagaaggttcatctcgtcagctacgaccgcatggacgtcacagggtccaacgagaggctctcaccttcatcaggacttcgcccagaccggtctgaattagccacttgcccctctcgcctccccagccgcgcgaggtgccggtccgggtggaggctgcggccgtcttgtcgatgaccgtctggagaacacgcagacctcgaaggcgagtgagggcatgcgtcgagtcgagcagagctaggagaggcggcagtaggaccggaataggcactggagccgcctcctgccagtcggtggggtcaaagccaaggttcagcgcattgtctcgtgcggcaagcagaaggagccggacgcgtcgtgcatatgcgcgcgtcaacgagccagggaaacaaaagactaacgtcaaggccctcgatagcacgacggaggacgttccaggagccccagccggccgtcgcctgccaggtctcgcgctcgggcgtgacgtcgtcgttgtagaccggctttggcagcgcgcgaaacgacgtcgtcgacagttgcggcggaggcgtcatttggaagattggcttgagcgagagcaggtccggcggcgggagcttcgtgaggagggctgtcgcacatgtatatatcgtcagcttcaagactggaggtgatcaaggtggcggcgatgcgtaccgccaaccttcgaccggacgcgcacgtcgagcacccagccctcttgctcctcggccgcttccgccggcagccagcggctcagcgcaaacgccagagctcgagcgtcctctgggtttgaccaggtctctggctgatcgtctgccaaacgggcgagctcgccgactgtcctctcgaagccggcctgccaggcgtcgagcccgtagactgagacgaggctccggtcgtcctgcggcggcggcagcaactccggcggcggcagcagcgcggcgaggaggtcagggagcgtcgacggtcggggctctgcgatggtccgctcctcttcctcttcgtcgacggtggcctcggagatgatggccatgcttgccagcgagctcgaggaatgcttggtcgtttggcggcgggagaggatgaggtcgaggctggctggccgtcgggaggtgtccctcgaggcgcgagccgacgcgtctggctcgtgctgctgccgccgctcgtcatcaacctcgaaacggtcactcttcgtcccagcaaggtcaatgtcctttacagcagtcagtcgagagcgctgatacgtctgcctgacgttgtagctgacagcctgaaccccactctgcaggacgaccccacgttcaagggcctcctggcctcgctccgccaggcacaagacactccgccgcctccgcccgtcgaggcgcccgctcctgctgccggctcgtctacggatgctgctacgccagcttcagacctagccagcctcggccgaggagggtacacggtcccgtacgagctcccgccgcccgtcgacggcgtctacccgacctacgccgagctcgagcagacccgcagcggctcgaccccgacagacccgcgcgaccgctctgccgccgcctccgactcgccagccccctcaactctatcgacgcctggcctcccagcgtccgcacagcagcctgcccaccaggatccgttcgcgacgacgtctggcggcggccagaagccaaaggacctccgcctactgaccttcacgcaggccttgccttacctgacgcggctcgccgacgatccgagcttcctcgccctcattcggcaggtacgtcccgcccgcagtctttttttggtctgtggtcatggtgcgaggccaggcgggcggatcgccgatgctgatctttgattgtacaccggtgcgctcggcgcagctcaagaacgaccaggacgcactcgagcggcgccttgctagccagcgcaaggagctgatcgagttgcacaaggaagcggtcgcgaaggcaagattcaggtgtgtactaactccgctctgagggccctcaaggccgtcggtttggaaattccgctgacgttttcgaccacccgtctctcactccgcttctcagagctaaaatgggcggccagtctggcttgacgacctttcagcagacggtgcgcggcctgcgacatgcctctgcccagtctcgtgcgttgacgttttggggtgggctcgtactcctctgcaggacctggccgacggtctcacttcggctttggcggccttccatcggcagcaggtcatcgtgcgtccccccatcctccagccagtctgatcagaatcccagtcgagcaacgggcctggtcaagctgcatctcacgcgatcgctctatcgcttacccttgcgcggcctgccgtccccttcctttctgcttagccgacgtgggaccacctcgcaaagacgcagctcgacaagctcgaggcgcacggcgtgcccggcctcggaacgttccagactgagcacgagagcgagcttggagcgagccgggtgcgaaagatcctcggcgtgctcgagggcgcactggaggactcctagcgaacgcagatcaaagggtttcctcgcgggactcgcgtcggacgtgccaggcagccgatccgcgcagagcggctcgcggtcaagctgcgtctactgggtcgagggaggggaagagagaccgacattggccgacgccccttttttctctgcgccggcgtttcgagtcgggccgcccggcctcctctttctcgctgcttgagctccggccggctcgtcttcctccgaccgccatctctctcccaccctttcttcccgttctcagcctcctatgctgcagctcaagctcccgcctcggccgcctgccgtctctggcaacggcctgccgccccctctgcctccaaggggcagcccctcgcctcaggggcccaacttctttggccgggctgtcggctctgctcctccttcgcccgccctctcctcttcgtcgctccctcagacaccgcaccggccgtccagaccgttgccgagcgagccggtgagctgtcaaccctactcatccttccggcgccctccggacctgctgctgacccgcgctgtttgccttcgcttgccgcagattacccttgtcggtcgttccgaccccctgtcacccgtcagcgatgacgcaaccaacgaaggaccggcccttccttcctcaccgcctcgaccgcctctacgccgcgatgccaccgtcatacccccgtctccgagctcgaagaccgccccggccctgcccgcaagaacgttggcggtcccgccgaccagcccgccgcccggctacgacggcccgtcgtccggcccgcagtcaggttcgccgtctccctttatcctcggcggcctcgtccagccctcgagcccgtatcagagcccttggatccctcccccgacgccgaccccgcccgacatcggcccgtacgacgaggccgacgacgaggttgacgacgaggccgaactcagcgaccccaggctgtcgctcatgacgctacctttcgacggcggcggctcaatcacctcgtcgaccgcttcgacgccggcagacgaggtcgatgacgtctctggcaccgacgaggccgtctactcgccctctgccgacttcgagactgtctcagtgccgatgctccggcgtcagtcgtcctcgttccccgaagatcagcgctcgtccgacctgacgaccatctcggaggagcgctcgtcgcgcatgatgcactcgacgcgctccaactcgctcgcgacgagcggccggactgggagcggcagcgcgagcggtgggcgtggaccgcgcgattcgaccttcagcggcggctgggagacgctcgagtcggccggcttgcggaagtcacgccagacgagcgccgtccgtcagaacacgtccgagacggtcaagacggcggatgggacgccgtcggcacggtcggccagtgccgacgctggtcagtcgccgactgcagccgagtcgaccgcgctcgtcgtcgtctcggagcctgtgggcactctccaggtgctcaatcggcccgtgctactgcagtcgccctctgaggtcgatgtcgccacaaaggacgaccccaagccccttgcgccggccgagcagattgtctcggacgaagcccacaggacgccccaacccgtccgccgacgctctttcagcgcatccgaggtcctcgccgccgcccccgtctcctcgcccccggcttcgggccagcggtcgccattcctcacgcccctccgaccgccgcgcagcctctcgcgtcctctgtcatcgtcgagcgggaccctcccgacccgacctgacctcaccgtcatcccgccgtcagacgagcacatcgctacccgtcgatcctcggtcgggtcggacaagaaccttcctgcgctgccggtccagccctcgccgcctgcgctttcggcaaacgggtcgagcacgacgcttcagccgacgatctctcgctcgagcctctctcgccagccgcccttgatcggcgacccgtccgacacgcccgggctcgttgcgtcggccacgagtctcgcgtcgagcgctgtcctcgcgcgctacgttgacgcgctcggctcaagtgctgacgatctcgtccggcacggtcaggcgctcagcgcgtccgcagtcgacatggccgaccgagcgcgggtcatccgacactttgcactgctgccgtcgggcatcgactcgcagggcaaggccaccgaggacgacgacccgagacgtatgctcgaggcgtcgcttgcgctctacaaggctggctcggagctcgtcgcgcgggcgctcgacctcggtcggacggcgctcgagcgtgcgggcgagcaaacgagggctgctcgggcggatgaggagcgtgtgagggaggaggcggagaagcggcgaacgactgcggagcgggaagtggaggaagagcggctgttgctcgaagaggagagggcggcgctcgagcgggcaaaggtcgtctgggagaacgagaaggcccgacaagccgctcgctcggccgcatccgaggacggcactcggtcgcccaccctcgccctgtcgcccccgtcgcctcggtcgcccgccatcaaccccactggcgccctctcccccggccggttcgtcgactcgcccttttcgaccgccgacgacgtgccgactccggccggcccgccctcgccctggaagctctttggctcgacggccgcctcgcgcaaggcccgccgggcatcgtcgtcgtctgcgccggacgctgtgggcaagtcgggcgatggaggcgccgcgcttgccgcggcgcaggctggcaggcctcgcaagtgggggctcaagaagcgggcgaacgggtcgggcgtcgcttaggcgagcgtaggtgtgaccgcttgctctcgcatgaagcctcgtcgtgaccctagcctgccgttcatccgaggcagggtacaagtacgccggctggctcgatcgcctcttgcgccctttgtgtcagcgccccgtcttctcccgccaaccacatccaccacctcctcctgctctcctcctctcgcctcctcctcctcaagccctctctcacgctctatttctcatcagtcccagtcgtctctcctcctcccttcgatcttcttttgatcgaacccgaacggccgcattctcgctactctccctcgcgcggcgtccactacctctcttcggaagcggacccgcccccctccctccctcctttgcacctgcctcctctgcctccctcacctctctcacgccgtggatggttgctgctacgacgtcaccctcacaactggtcgaggtgctcgaggacctctcgacgtgcgtttccccgaccgcggccggccgagctccttcccgcttcgcagcgctgaacaaggccccacctcctcctcctcccggtctcatcgtcctccatccagccgcttcatcctcaatcttccctcgtccgagctctcgtcaatcccgcggatcatcttccaggtcgagcaggcctactggtactactcggaccacgttcagccgtcgcatccgacgacgctgccgacatgcacgctcaagacgttctcggccctcctcttccaggtttgcccgctgctcgaaaagtgggagcccgagcacgaaaaggtctttgtcgagtttatgaagtacaagagccgggtgcccgtctgcggcgcaatcctgatcggcggcgaggcctgggacaaggtcttgatggtccgcggctggaagggctcgacctggggctggccaaagggcaagatcaaccagaacgaggccaagcacgtctgcgccgcccgcgaggtgcgtctgctggttgctgccctgccgtaaagagggattgctgacatcaccgctttgcgcccttgcaggtcctcgaagagaccggctacgacccttcggcgctgctcgacccgaagcactttatcgagctcacgatccaagaccagcgcatcacgctcttcatcgtcccgaacgtcccgctctcgttcccgttcctcacccagacgcgcaaggagattggcgcgatcgagtggtttcggctcaaggacctgcctgggtggaagaagcgggcgccggggagcagcgacgtcgacgacaaggaccgggcgacctacagtcggaacgcccagggcaacaagttctatctgacgacgccctttgtcgggtgcgtgcctgttctgctttgacttgcgcccgacagccgcgctgatcagctccggctccggcctccccctccgcgtctgcagccagctcaagaagtgggtcaagacgcacaagccgctggcatcctcggccaacggaccgccttcgccgccgaccaacggcctgccgtcaccgacgctcacaccagcggctgcctcgccgccgatggcgcgggccgagatcgagggccccgagggcggcaccaaggagaaccgtatcagcgagctcgacgagctttttgagcggttcctcaaggacaatactgccggcccgtcggcggccgacgctcgtacaagcgacagcgaggacgagcgcgtcctcgcctccgctcaagcgccggcgccgggctcctccgacctcgagggcggcggcggcggtcgtctgaacgaacttctcgccggccttcgtgtacgggaggagacgaccagtacaacagtcacgactctctcggccgactctggccatttggtctcttcgccggcggccggccccaccagctgggaccatcgccacttcagcacgcctccgctcccgcctcagaacctgtacaaccatcgaccgccgccgccgccggctcagcaacgacttgacgaccctcgcctcttcacgccgtccggcctcggcccgtcccaacagcactcgcatcagcaccaccaccactttgcctcgcctccatcggcggccgaggcctcctcctcgtctcacggttcccttccctctctgcctcagtctcagccacaatttttcggcatccccactgcgccctctgcagcttcgcagcagcagggtggcgctccgctctctcctccgggagacagggcggtcaaggagcggcggctcctcgacctgcttgagagcagccttcaggcgtccgactcagccgcttacggctcgccgcacgccttccacgcccatcagcctggccagcatgagcagcagtatcagcagcatcagccttcgccgtatgctggccaccaataccctacccctccgtcacagcagccgcagcagcggcggcggacgtccctcctcgacatcctagtcaccggcaacggctctgagcggggcatgcgcaatggcctccattttgaccagcctggctcgcctcagacggccggcggcggcagtcggacgccgacctcgcatcacggccgaggccagacaacgtcgtacggtcagccgtcggcggccttcaacccgcagcagctcgtccagcccgcaaacggctttgcgctcccgcccccttcaccggtggccaagaggagcaacccgtcggacgcggctcgccagtcgcagacgcttcttgcgatgctcagctcgccgccgccgccgcctcctcaggcgcacccggcctcgcacttcgcctccgatcacgcccatcagcctaatggaggcttccaccacgatgcttcccctactccaccgccggcgacgctctcgggcaagcagcagaacctactcgacctcctctcaccacctcagcagcggccgcagcaggtcctcttgcagcagcaccagcagcaccagcacgactttccgcagcagcaacaccagcaccagccgcacccgacgccagaacgatcgcagcctggcggtgagcgggagcgcatgctcctctcgctcctcggcgccccctcttccggcagcccgggccggccttcgccgtcgcagcagcagcaccaacagcaacagcaccagcagcggtcgcagcagtcttttggaccgtcctcgccggcccacaacacccactccgcctacggcgtgcggccccttccgcaagcccagcagcaacaccaacaccagcagcagcagcttcaacagccgctgtttgcagccgccgcctcgcccgcgcacgtcggcggccaggcaaacggcctcctcgaccttctgaacggcccgcccgccctcgggcgcggtggccggatcgcgcagatcgacgtcccgggctatgcgaccggcgtgcgtccctcttccttttgccctggttgatgctcggtcagaaactgaaaagtccgcgatctgtcgctttcagagtccgatgggcatgcctgcttcgtccggcctccctggcagcctcgccgtcggcagaggcatcaacggtctgccggtctttggcatgtagggccgtctcgccctcacaccgcgccgtcgccatctcgttctctttgacctcgcctcctcttacgtagcctccctttgcccctagtcccccccccccttcgacgctccttttcttcttgcccgttcttgcttctcctcctcgcacatacgtcgccccctttgaccatcacttgcctgccgtcccttcttttagctccttccccttctcacaacgtcacccggagcagagcagctggccctcgcctatttcgacgctctgatcgatgcccttctacttgacagcgcttgtgagagaaagcatcgggcaagtgcagaacgtgtaggtcaaaagcaaaggtcatcaaggggaaacggaaaagatggagggcgtgatggaggaagtgggcgtcgtgtgcagcggtcgagatcgtgtgcaaaacggtggcggacacagctcaagccgaagtcgaagcgccgccgatgttggtagcagagggcgcgacattcggcttcgagttgagaaagccgcggagcttgctgtcggcggccgacgttcgtgcggcctcctccttctcgattcgggcgaggagcgtcttgaccgaggcgtctgcaggggcggccggtgtgagcaaagttagcctgggacgctaagcaggtagtcgcagcctgatcgatgaaccgttctggtccatctccttgagcacgcgcttggccttctgcacgtcgcctgctcaagaggaaagcggcgcaagtgtcagtcgcttcgagcgcaggtccgccgcaagggtgaagtgacgcaccgctcgcgttgagcgccgtcgccttccggaagctcgccttgacgtttttggtgttcttcttgagcgcgtcgtccgcgcaagagacggctgaagcggggagtgccgtcgctcagtcagccgactgcttcttggtgaaagcgcagcaggccttcagcgcatagaacgcaccgcgggcccagttctgccgctttagctggacggcagccatgttcgagtagataagactggagaagatacaggtcatcagccttccgaatggtgctccttcgcttgcgagaaagtcaaggacgcacctcagctcgccgtcgacctgatgagcgcaaagggcggccaggtcagccttggattcgccaaagggagagagttgcacaaacaccagcaagctcagccttgccctcgccgttcgtctcgacgcccatgatgctccggtcgaggccctgaaggtagagaatggcctgttgtgcgcagggacatgggtcaaacggagttgtacggcgtcaatggagccggtccgaacgcggcagctcgagctatggaggagagccaggtcgcacatggtggtactccttgatggctagcgtgcaaaagggcgtagagcaaatcagcaggagcatcagcgcataggtccttgggtgagtgctcacccgactggaggtcgccctgcagaagccggaattcgtgcgccgtcggcacgaggatcagccccgtcactcaacgtctcgacggacgcaaaggcaactagctggctcctcggcagaggtcagtacgcacgaccttgaaggcttcgttgccagcagccttatgcgttgcagcgagctgctgcttgcgcctggccgagcgaacgcgaagcacaagacaagagcaggtcagggcgcgtcgtcgggaggccgcgaagagcggcaatcgagctcgaggtcgagggcgacgcactggatctcggtccggacgtcggtgctgctgtcagacatctctcaatgcgagcttctgtgcctagtagagcgagagcaggagggaggagtgacggtcggcaagacaaggaaaccgaccatctcgccctcccgaagcagcaccccgacgtcgacccagccgcccgccctctttcgcctcaaggagtctgacagccgctctccggccacctgctcctccggcttagcatgtctgccgcccgtccaccaccgaagaacgactacacgccgccggccccgctaccgggctcgctcaggcgaccagctgccccgggcgcgtctgctgcgacaactgccgctcaggcaagcatcgacccggccgagtatctcgagaaggccgagggcgagtggaacgagcgcgttgacaaggagatcggcggtcttgcaggcggtctcgaaagccttgtcaagagctttggcgtggtgcgtccttcggccgggctgcctcgtcggctcccgttggccggcgctggtcctgccgccctgacttcgcaacgctgaggctgattcaacgatgctgtctatcgtacaggagccgacgcaggcctcttcgcagcagcatgcgctcccgctggcctcgctctcgctcgggcttctgcacgctggcctgctcaagaatgcgcagaacctgctcaagattacgcatgacctcaagctgctgcacctgctgtcgccctcgtcggcggctccggcttccgctcctccttcggacgacaaggcagccgcaacggccaatactgacgacaagccgatggccgtcgacgaggtcgagcacaaggttgacacgcagacgcaggccgcgtcctcgccgagcttggacgcgctgcgggccgaggtggcgacgctcgagaaggagtggcagcgctcgacggcgtaggtgccgcaggccgacatgcgcatggcgagacgggctcggcaaggcgtacttgacggcaacgcatagtcgacgatatgcgccccgcttctggcggaggcacctgtgggccgacgctactagcctcgggcccttcaactcggcctcgatccaagtcgacggcgcagtgcggctcggcggcgacacgacgccagcagcgtcgctgcgccaaagcgcccacgcctttcctctccagtcactggcagcgctttccacctgtccgtcgcatacaagcggtcgctccgctcggctcccacgcgatgcagagctttcctcgtcaagattcttgggacctcgcttcacgcaacaacagagcgctcaagcctcggacgtcgttgtctgcaaggttggggcggccacgtctgtacttcgttcagcgaagagccagtacgtctggctctgtccttcgagacgctttgcatagcgggtgagatgacatgcgaccctctcacccgtcactctgccgctgcgagccagctctagcagaagaaaggcaggtacagtgggcgaggagtgcatgtttcgactcacgggaacgcgttctgtcgaatccgtcggacgacggccgctctgaccggcgcagcaaccatctttgcctgtcgcccgaccaccttctcgcccgtcttccaccttcccgtctgcgccgcttacctaggcccaacacagtgtgtccgccttttgcttctcctgctcgccctcaggctcgactgacgcgccgtccctgcctccttcaagacacccagtcgctcaagacgacctcgcccgcccccgcttccgacgcctttcgcgcgaccgacttccagcctttgtccgcctctctccccctttgctctgctgagacgacccgatgtcatgcgcccgatctttcctcagaactctgcaagcgtgagttgactgcagctgcccgttctaccgcgaccatcttctcatctcctctcacatccctcaagaggcagcgcatcaatcggcaggaccagactcctcgctcagagccgccagacattcagctcacacagcagagcgagagcaaagccggcagccgagagcgcggctcggacgttgtgcagcagggcccacttggcgaatttgggctcgacatcagccgcgctgaaggtctcctcattggcagacgcgctcttcctcatcccgaggaggagtttgttgagcggcttgatggcgacgagctacgaatgcgataagtcaaaggaaggacggaagttgtcaaagggccggcgtcgacaacgtcaaagggaaggacgtcaggtgacagggagacggcgtcggcagcgtctatccggcgagagcgcgacgtacggtaaagggcacgatagcgagatgcagcacgacggagacgacgaggctcgtcttgcggctgctgtagccgacgagctcacttgccgacgtcgggccaaaggcgaaggccgaggtgctgagagcgatggcggtcgagagcgcgagcaggggcatggccgccatcccgttgtgataggcgcggtcccacaccctgagccggtccttggttgaaaggccgagcgagccgtctcgaaagagagggttgattagaatctgataggaggcagtcaggcctgttgtgaggtcgggaatgagaatgggagggaggaaggagggtcagcggtcggagccgacggggcgagggtgctgcgcagagccgccgtaccggcttggaggccggaggcaaagagcccgacggcggcgacggtgtgggccgtggacatgttactgcagcgaagagagcagataggtgagcagaagaaggtaggcgttagggaggatggagaggacggcgggctgagggcgactgcatccgccaaggggtttcagctcgcccgaggcatggccgaggcaagccgagggaggctctctcgcccgacccaccgacgacgacccgactgccgccgtcatcatcgcgcggcatcgcagcttgacaggataggcacgctgaccgagggtcggctgctgcttgacgtactaaacgaggcggcctggtcggttggcccgacccgccgaccaccactcccttctcctactgctatcccctcctcctgccatctcctctgcctgccaccttgccctcacaccatgtcacccgttaccgccatcgacgtcgccgaatttctcggcccctcaattgcgctcatcaccgccggcggaatcctgtcctactcggtcctgatcgccccgctcgtccggcgcgccgccgcctctgccgacgccggctcgaccgtactcgcactcgccctccttcggatgaccttcaagattggcgcgaagatcttcccgcagctcgcgacgctctcggccgctttcttcggctacctcgccgtagccgacgcccaggccagctcaggtcgccggacgggcttcgcgcttgctgccgggggcgcgctctcgattattccattcagtgcgtccttccctaacgcgacgcccgccgactccctgccctccgcccgcctggcggctgggggtgcgtcgagcttgatccttgatctcgtcagtcttgcccgccatcacacagcgcgctgaccttctggctacctttagcgactgccataatgtttccgcctgtcaactcgcggttgatcgactatgatgaacgcgccaggcgctcatctgccggcgcagccgaggtcgacggcccgaagcgcacagccgaggttctcgacctcctcaagcagtttgagcggctcaacgtcatccgggcgtgcttgctcggcgcaggaggcctcatcggtctctggaccgcgctccagacctgagtgggggtgggtgtcgggctgacgttgcctctgccgcttcgtcgctcgcctctcccgcagctcgccccatgtaccctaagtcggcggcctctgcgcccgctcgccttccgtctatctcatgcccttttcgcgaaccacgccatcggacaaggcaagaacgtccatctgtctcggtcaaacgaccgcgtctgctcgtcctgtctaagcgcaagcctgcgcacatcactcttctggcgacctctgagcgctgagcggcagtggtcactcagagcttgaatggccaagcgaggtcgtcgccgtaactggaagagaccgagtaggagaacgtcagctgctgatggaggagggtcgatggcagtgccgtgccacgcactactggttgaccgtcttgacgaccgtgtacgcctcgatgccgttggagccgagctcgcgcccccagccagacgccttgaagccgccaaatggagcctgcggactaaggcccgagtactggttgacccagacggtgccggcctggagctgacgcgtcacccgcggcacctgcgaggcgtcggtcgtgtggatggcggccgcgaggccgtaggcggtgtcgttggcgagcgcgatggcctcggtctcggacgaaaacttgatgaccgagaccacggggccaaagatctacgggaaggaggtcaagttagagtcaagcggcgaaaggagtgggagctggtggcaacccttgcttgcagacggacctcctcggtgccgagcgtggatttgggcgcgacgttggagaagacggtcggcttgacgaagaagcccttgcccggctgaccctcaggagcgaagctctcgcctaaaacggatgctcgagcgtcagaccagcggcgagcagacgacagcgagaagggcagcagacacacccccaatctcgagcttggcgccctcgctcttgcccgtctcgacgtagccgaggaccttgtcgaactgcacctggctgatgaggctgccgtagaaggcgtcgggtcccttgccgaccgtcatctcggcgacgcgggcgacaaggagcttgacaaactcgtcatggaccgactcgtggacgaggatgcgcgagccgacgatgcacgactggccggccgtctcgactgtcgtagagaagaggggagacgagtcagaggccagctcggtctcgactggaccagagcacgacgacgtacagaggccgaaagcagcccatttggaggcctcctcgagatttgctgaagggaagacgatgtttgggctgtcgagaccgtcagcgaacgactttccttgagccaacagacggagaacaagagcacctcttgccgccgagctcgagcgtcacgaccttgaggttcgactcagccgcagcgacggcgattcgccgaccgacagcggttgacccagtgaatgcgaccttgtcgatgtccatgtgcgcggcaattgccgcgcccgagaccttgcctgtgccggtgacgagattcaacgctcctgctgggtatctgcaacagtcgcagcgtcagaagcggatgaaggtgtcagcgatttgcgggcgcagaagaggttctggcccggcggacgcacccaacctgctcgcagagctccgttaggcggaggacgctcagcgctgcaagcatgacggccagttaaaggggtcagcgcgagcggcgagaggcaatcatgtgcagcactgacgcgtattctcggccgtcttcagtacaaccgagcagcccgctgcgagcgccggcgagatcttccaggcccacatctggtgagagtggagggcaagaggtcagtcaagcagccttgtctgcggttgaagaggcaaacagcccaccatcatcgggaagttctgaggacagcaacgagccagcgtctgtcagccatctgtacacttcctcgtttcgagtcggaaggacgaacccaagggatgatctggccggcgacgccgctgtcggtggcaggcaagtcagcactgacgtcgaacgcgaaagagacaaggcaagccaacgcacattggctcacgccgcgtaaacacctgacggctgcggtcgttgatctcgatgctctggccgtgaaccttgtcggccgcgccggcatagtaacgcatcgccgcgagcgaagcttggacgtcggccttggcccactggaggggcttgccgccgtcggccgcctcgagcgcgctgcgcacatgagcccatcacacgcgagggtcagcctgctgtgggaagattcagccgagcaacggacgcacctcagctcgtcgacgttctcctcgacaatgtcggcaaaacgtgcgagcagccggccgcgctccgtcggagggacgttcgtgccccaagtcttgttgaaagccttgcgcgcgctcttcactgcggcatcgacgtcctcaaccgaagctgtgtcgaccgtcgcaaggtgctcgcccgtagcagggttgtagacctccagcggttccccggtcccgctagaaatgcgcgaaggaagatgatcagcgactggcgggggctaacgagatgcagaagagaagacggaccggtgccactggccgccgtagtagatgccggtcttgatcgttgatgtcgagccgtcatcgcacttgaccgtcgtcgtcggggcgctcagctgagtgaccgacgagctaacgagccgggccgaagacgacgcgatcgcccgacgcgccgccggccggtagctggacggagccgccaagtgtgcttgagacagcgcccgcgcgaggtagagaagggatcgggacgccatagctgtctgtgcgagaaggctggaaggagaaggaaagcgaggaagggtcgaggttgagagagaagagagggaggagctgctggttgacctttcgcgtgcgagggacgacgctaccggcgaccggcgtcgagttccgccgacggttctcgtgccaacatcgggccgagagtcaacgcgggcaggccgcgacgggcacctcgacagagaacaagctgaaggatgtaggcacctgctgagaaaagcagatgcgagttcaaggtcaaagcgagcatgatctgagagtcacgctgtactgtctgaaggccaagcgaaggccgagcgaagtcctagtcgaccattgatggccgtcgcttcgactctccctccccgaccctgccccagctgaccctgcagtcagtacaggaagagcgggacttcgacagccatcagacgggagagccgagaggagcagaacattggtcaaaggaggtgggcagctgcggggcgcaggcatcgggggcgcccagagggtgcgatggcagatatcatgtagtggtctgctggcgagacgtgtcggtcagtgtcaagaacacaactagaggcagaacgcagtggttgggacgcaccatttcgtcgtcctctgccggttgctcgtcgtcctcgtcctcatcctcctcttcgccgtcgccgtcgtcgctctcccactcctcatcgctcccgctctcgtcctcgtcgctcgattcgccgagaccggggaaagcctcttgcaggaagaccatcttgcgctcgccgagcttctggagcaggcggggttgttgtgacagccgttgcaggttctgcaggcaagcggcggtagccgacggtgcgggagaggttgagcgtcagcacggcagctcaaagtcaagcgcgatcagtcatgatgctcagttgaggctatccgcacctggagcgacgtcgtcagtagttcggccaggacctccttgggtgtctgcaatggacccgacgagagcgggcccgaggttggcagcggcaggtcgttcgcctcctggtagtgctgctcgccgagagggttgccacacggatagtcaggatcgtcagcgcctcttgagatgcgttgagataccagcccgacgctgccctcaaagacgaccaggcgactcacaatgacggcgaggtcccagacgccggctccgccagccgcctggccggctgcgatcacgagttcccggcggacgccctcgctgaggccctcgacctcgtcatcgagaccttggaccgcctcaaagtaggcgaccggccagaacaggaggtcgagctgaaccagcgagcgcgacagccggaccggagctgttggcggcgtcgacgagatcgagagcgaggcaaagtctgagagcgacatggttccgtgcgggcgggcgagggcggttgcgggctgcgtcggcctcgagagcgtcgaaagatggcggcaaactgatgagagccggaggaggaaggcggacggtcgtgcggatgtctgctgggcctgccagcgttcgtgaggtcggtcgagggtcgttactgaaggtcagcgggaggtcgcgtcgccttggcgggcaagagacgcgtcgcgccgagcgtcgcgtcgtcgggcgacgactgctagctggagcaccttcacatcagcgcagatgcatctgtaatcggacgatctgcgggagacaggcatgtgtaatgcgtttctacaagggtggaggacagacaagaacccgaaggatgaagaaggcagacggccgcagccgtgcgcgccagctgaatagggaggagccagagaaaaggagagagtagaaaggcgagagggccggaaaaaagtccctggtcgagaagatgacgaggggtgacgcatcaccaggcccgaggcatcgaagcacgctcttgcgcctcttgctgctcgagcggcaacgcgacctcgaggaccgccatgtccttgccaaggcccttgaagccgctgaagccggcctcgccatcgactggcttcgccggcgcctgcgttggctcgtcgttcggcagcgagaggatcttcggttgctcccaagctggagttgtgggcccttgcgatgacggaggcgaggagccaggcgccgtcgcgtcgacgcccgagtccaccgttgactctgcctcgtcctcttcggggtagtgagcgtaggcggggacaggcttccgagttgcgcccccagctggcaaggcaagcaaagccgagaaggcttcctcggccgccgccccgtcgtcgagaactggcgcaggtttccgtgcggtcgactgcgcgcgaggggcggtcgcggcaggcgaagacgggtcagagagagaaggcgaccgggagccgacgcctttcggaccgatcagcagcgccgagcccaggccgagtgagcgcagatgctgctgctgctgctcgtaaaacgagttgggagtgtagacgttgcccggggagagtgagccgttcggaagcatcgtgtcggtctcggccggctgcagcgccgaggccagcgacggcggaggctcgctcttcgtcgtcgcgagaggcgacaccacttccgtcgccacaggtgtcgatgccaacggggtggaaaagtacgacctggccgacgaccacaagccccagccgcccgaggacggtaacgccgttgccgctaaaggggcatgcgccgcggaggtcgtgccgccggatggaaggccaaggcccagaccggcgccctcggatgccttccggtacatggcagcgccgcctgtggtcaagagtgggggcgggcgaaggacggccgcaggggcgctgcctttcctcgccaacgggcctgggaaggacgacggcgtgtaaacccctgagctcgaccttcgtttcggcatgggaccagtcgcctcgtgatcagggatctggggcgatgttggcggcttcaggaacgaggaagacgacgacgaggataggttgggcgattggaacgacggcgaggaccatgacgagtgaccaggggaggagtggactggcggaccgagcgaggacgagcgcggcggcagctctggcggtcctgcagactccacagatggcgcgacccaatctgccgatgacgagagcgctgaagtgctggcgctcgcgtcgaggccggacaaggtcgatgtcgaaggagggtctgagacgccctgcgacgcctcgcggaaggaaggcagagctggcgtcgaccactcctcggccgggtcgatcggctcgctggccagctgccgaggctctgcgtctggggtcgctgcgtcagactccgtcgagctcttgtcgccgtagtcgagagctttggcgacggctgcgacgccgacctcgccggttggcgcggcactgacccgcctggacgtcgcggccgggctgctcagtccagacggcccgggagagagccgagccctcgacctcggcggaggcccaagcggaggcctcgaggccggagacgaagccggcgaaggtgtgacggacggcaggggcgaggaaggcgccagcgaaggcgaagaaggcgaggccacctgggatgggtcgaccagcggagtctgcgaagccgcggcggacgagaagcggcagggtgcgtcagccgcaggtccttccagacctcttcaagcatagctctctgcatcacccggcgagacctgctagtctctcgcaggcaaagcaaaggcaaccggccgacagcagcctggtcgctcgcagaggtggtcgcgggcgcagcgtggggcaacccgctgcgtgcccctttcgaccgactggcacgcccatccctccaagcattactcccggtagtctgacctcgcgcacgcacctgactaatatctgcctcgatgggctgcccttccgtttctggctggcctggagttgtcgggactggtgggtggtcgccttcgagcgggggcgaaggaggtcgggcgtcgaccgaaggaccgtctgccggtgccggctcgttggttgcgggctcggttggaggttgctgctgctgctgctgagcgccaagcgcctcgtccgacccttccgaggacatgtgtgcacgagagcagagcagccggatgtgcggttggcaggcagagcaaaggtggacgtcgaagcagtctcagctaaaggaggcccgcgcccggaagcgacggctcgcgcgctgcggcgctgaaagtgctctcagcccgcgacgtcgactcccttccgcgctcctcgactggacctctgcctgctgccgaggtgatgtcgtggctgctccggaagaagctcgatcggaaggacgtgagtcgctgaagagaaccatctgcttttgactgaacgtagtttcgcttgaagggccggtagctgacgctcgcccctcctcgaccctcgtgcgtggccttcctcacccggctttagtccatctcgtccatcggcagcaacgccacacggggcagcgatgatacgagcgtccctcgtaatgtcgcctatgccggggaagatgcaccggagcagaatggtcagtcgcagcgaccatatcggcttgcctggacgacgctcgcgcagacgtccgcagtcgacagctgcggtcaccctcctctgcctcccgctgacactccttcgatctggcttcgctcggtcgcatctcgatcaataatcaggcagcgcattcctcaaccggttcaaagacatgaagtcgcgctggtccgacatgctaaacgtcgacgacctgctcgcggccgagctctcagacgctcgcatgcaccccgagatccaatggagcgccggcctgcggcggtcaaacgacctctgcgaccaggaggcgacgctcgtcagggagcggcggaagcgagcgaccaagcagcttcaccgattcctgcgtctgccggaggacgaggaggtggacgagcgcgacgtacccatcgtcgccatcggaggctccggcggcggcttccgcgctgtgagtgaggagacagcgagctcactcccagtgggagattccgctgacgcctcctcggccaaagtagatgcttggcctgctggcaaccttcgaggcggccaaagaggctggcatgtgggacctggttcgtcctctgactctctcgccgctgcttcactcaagggctgacaaggagtcggtcactctttgccgacagatcatgtatactggcggcgtctctggctcatgctgggctctcggcggtccgttggccagtctcagcttggaccttccccttgctgacttcctgcgcaccctctcagcttactacacgtggggcgagttctcaacgaagcgcgttctagcgcactttgcaaagcactcaatgcagtacgtcgcagcctccctcgctctttaacgtcctacatgctgaacgcctgtgctcatgaccggcagccatccgctgagtccgaagtgcgtccctctggtcgcttgcgttgtcgtccgagcgctgactctccttgtcgatcgtccagggcgatgcgagagacgatgaagagccctcgagggccatattttctgctggcaccgctgtacgttctgtctctgtgcgtgctagaccttatctctgacctattcccatgcggctctgcaggcagcagaagcacctcgctggcctgtcgcagacgcttctcgacatctacggctccttcgtcacggctttcttgtggctgcgtaagtcatcaccctgtcctcgcctcgcccaatactgcctctgacgcaatcttgccgcacgattggcagcgacgaaggaggaggcgcagacgatctggaaggatcgcttgccatcacttcatcgcgagtggttccgctggagctcggtcgcaccaaagatcagtagaggagaggagccactgccgatcctcacggcgatccggcacgagcgaccgtggagtgcgtactcttgtctggcgcttctctctggccctgctcggcctgaatctgacggtcacccttgcccctgcagaggcatggcgagacaaggagaaccccttcccggagaatcacaacgataaggagcatcgcaaggcccaggactcgtggtggcagtggtatgaggtgcgtgtgcgacgtctggatgctctgtcgctgtcggaagctgatcgtcgccctttgcctccagttcacgcctttcgagtttggctgcgacgagctcaagtactggatcccgtgcgtctaggactccctgctgcaaactgccgagactcagctgacaagtttgctcgcttacttccagcatctgggctttcggtcggccgtttgagaacggacgaagcgtcaagagcctgcccgagcacagcctgagctccatcctcggtctctgcacgagcgctccggccgctccgatgagcatctacctcggcacgattcagcggagcctaccaaagggctggatcgaaggcagcatcgacaacatctcaggcgccgtctcgcgtgcgtctcggcaaatgcgttgccgtcttgcaactctcactgacaggcgcccacttcctgttaactgcagatctctggggtgctcaagggacaaagatcttcgagggccgacatccggtgcatgccgccaacgagcacaatgtcagccgaccgctcaagcttgcccctggtccgctcatgctgacgagtccccccttgtcgactcccagccgctttaccatgcttcgccgagcccccgcccgcccggcgtcgagaacgctaagcggatccacatgctcgattcgggcatcaggcgagtcgctctagtagccttgtgcggagcgaccatcgctgacttggcgtcctcctctgctgcgacagcaacaactgcccgacgtaccccttcctgcatccctctcgcgggaccgacgtcatcatcaactttgatgcgagcagcgacgtccagagcgaggcagctgccgcccgcaaccaggagatgggcgacatgaaaggtccgcctaagcctccgaccggttcttcgtctctgggccatcactgattggtctgctctgattgtcccgtacttgcaggcctcaagttcacgaagcgcgaccaccccttcccgaagggcgctgccgacgcgccgacacaagcgcaggcgctcgctgcctcgtacaacgctgctgctcggcttgacgctggatcctctgagtccggcccgctcaccagcccatcaccctcgtcgacacacgcgcacggctcggacgatctcgggaccgatgacagcacgatcgctggcggctcatcggctcccggccccgacagagctgacgcggcgtcaagcaaagccggccgaccgaccggatcctcggttgagcagcacaaccggcgcgagttcgagaaggcgaaagcagaggacgataagcgacgaaagaaagccgaagcagaaggttggacggccgacagcatccaacgcaccttcggcgatcgctacgcgcaggtaaggtcaacccgactcgaccctgtcgtgcgcagctgactccggcggtgccgcagatatttgacggcgtcccgacgcacccaccagacggacctgggccgcagtcggacaatctcgagccctcgtcatcggcttcggccttcgaccagcagcccggctcgatcccgtaccacacgtcgaatcacaacgtcccgctcgcgacccggcccgtctctctcatctactgcccgctcttcccgaacaaggtcaacccgggctacgacccgtctggcgccgccttctctggctcgtacaacctcaagtggaccgaggagcaggtgcagacgatccggctgacagcgcgcgccaacttcaaggaggggctcgagtgcaaccggctcgtgatcggcgaggcctaccaacggcggaaagccgaccggctcgcacgagagcagtcgggcgctgctcacatgtcgtcgcccaaagcacctccttcaggagttgcctcatcctcgatcgacctccagccaaaggtccgcccagtcgagggcctgccgcctgcctccgccgctcaggtaccccttccttagactagacgaggcgccggtcatcgctcgcttccgcctggacctgtagacctcgaaggctcgcccggccgatccaggcacaagagctggcagcagggtgggatgggcgaggtcgagcggctgactggcctcggcgggaccgacattgaagaggtgcatctgtgtcatttttttcgtaacgctgctgtcgcctacttgactgacatttcgtcgctttgctgttctccggcttgcagctcatgctgatggagacgatgcggctctcgctcctcaagcacgagcagcatcaggcgcgcgagaggcaacgacggccgcaaacgggccggctacagcgggcggcgctcctgtggcggcagacggctcgacaacgacgccgacgacgaccactgcgagcgcaccggtgtcgtcgtcgacgtgagtccggccgaccgacgtaccgctgcacacggcaatattgccgctgccgacacccttcaacgcctttcgcactgcttctcccctggggtcctcctcacacctgcctgtattcagccctccgccttcgcaccctaaacctctgccctctccttcccttcgtgcctcggcccatccattctgccctctgaacctcgatccttctcaggccaaggggcacataaagatagaggcagataggtggcgtacaacacgaagagcaagcgagggcggtgcagataggtgagagtgggcgcttatgcgcttaggtaaggggagtgcaggattaggaaggttagatgcagagtgcgaggccgcggcttcgcgcggaggcgaatgtcgaagcaggaggccgaggtgcggctggatgattaggagggtacggagaaaattggcgcaagtggttaggcgagagagtaggagccgaagcaggcgaagtcgccgtcgaggattgcgcgagccggctcagagtgcgagtctgaggaccgcgattgccccgccggcgatgagagcgacggcgacatgcgcgtcaagttgcagggccggcgccgcatccgacgtgtcgagaccggcgccccaggtgacgctggcgacgctggcgatgctctcgcgcgcgctctgaagctcgttgatgacggacgagttgaccggccgagcagtcggcaagccactgaagccggcggggagcgtcgcgacactcgcaccttggccgagcggcaacgccgtatagccggtcggggagccgagaccggcgacccgtgttggcagatgggtgctcgtctgtatgacaccgttcgacgtggctgttgcgtaccaggccgaggtgttgaagaggtaggccggcgtcgcgaacgtcggcgtcggcaggaggacattgggtagaacggtcgtaaaaaatggtgcggcgtcgagcagggacgagacattggcggccgtctcgacgagcgaggtggcgttgccgagcgggaggaagccgacgagaggctcttgcaccgagtcgatgcccatgctggggggggggggggggggcgtcagttggaggaacggccaacagcacaggacgaggggaggaggcgacgcaccgacctccggccaagccttctgccactcgaccatctccggctcccaagccaacttgaaccgctccctcaagcgcgactcttcgcccggcacgagctcgtcatacttgtcgcgaaggcccgcccacgtatggagcgcgcgggcgacgatccggttcgctgcttccgacgcactgaactggtactgcgggtcgctcggagggcagactttgagctttgctcggggctcgccggtgaggtacatgccgacgatcgactcaactcgaccggtctggatacctggcgacggcgacggtcgcgagcaaaaacggcgaaaacgtcaggggcgctctttcgctcaaacagcaaacgatatagagaggacacccaccctggtaaatttcagcccgcgtcagcatcgtccacgaaatctcgcgcgacgcccggagccgctcgtagtcttcgacctggagcggccggtccgcccggtagtaggcgaggttctcgtactggaccggcaggtcgagccggatgtcggaggcgatgcgcctgcgagggaaggggggagaaagggcgaccgacgttagcgctccttgtttgtcgttcgggctcatgatagggaggaggaaaggacggacattgcctggccctgccaggaccaagagcgatcgtctcgccacgacttccctggcgatgcccagtgtctgcccacgcaaaacaagagagaggcagcgtcaatcccgagctcgccgacaccaacgagggcaagaaaaagaaacgcacgccagcatcccaaacgcctgcaccacctcgacactcttccacccaacctcaaaacactttaccgcgagcctctcggcatgcgcctgaagccgggcggcaaagtgcgccgaagcaggatcgtacgtcgccgtaacggctgcgagggcagaggtgaggaagggcgagttgagccggaggaaggagggcgtgtggagcgaggggtcgaggtggtagtagaagggccggagacggtagaagtagctgcgagccagcgcaaatacgcaagaaatgtcagcacatgcgcctcctctcgacaaagagtcaaagaggcaagaaggaaggagaaggggggaggagggaatggggacggacagctcgacgagccgcgacaggtcatcatgcgttaggatgccgagcgcgaccgggtcgagctcaaaatcgtcctcgggcgactcttgatagaggcctgtttgaccgcgcgcacaagggggcggcgaggggcgggggcgtttgttgacggaggacaggggacgtcattcgaccctcgtcgctcgtctcggacgccgatgccgctggcgaggccgagaccgaggaccggctcgttgactcgcccctgacggcctcgcctcggccatcgctccggcggctcgacacgccggtctacgtttcgccccgggacccggacgtctctgaggctgtcctgcgcgtcggagcctgggttggtatgacggcggcggcgacgcggcagcaggctgagggacggcggcaggcgaccatctgaatcggcctgcgaagcggaggctggattgggggacggcggcgtggccgccggtgcgggcgtgggacgtatgtcagcgcccgctcatgcaacgagccctttctctcttcgacttgacgagatcatcatgccgtccttctctgtcctcttctttggctgctgtaagcgatgacggtgtgagcgcagagtcacatcacatcgacttgatcattcgcttgaggagaaaaggggggcttcacatggtagtcagacgaccacaaccttgagcggccacatgagctcgagcatcaagtcagacatgtgagcgagtcatcgaaaaggcgttcgcgcagggtgaagcgacagtccaccctaccacgctgctcgacccgaccgcatgccgcttcgtgcctgatcacttacgtgggctgagtatgaccgtgccggcctcctccttcgagaactactagatgaaaaatgcctgccttctgctaacgtatgcttatcggatccaccggccatgccgcgcactgcccgaccgagcatcgcgcgcgggttaagtcgcagcatgtgcgtcgggcgtggtgagcatctcgcctcggtcgaggggacgatggtcggcgcgcgtctgctcgagcctggtcagttaaacagcgcgccgcaagagttgacagggaccgcccgcctccctcgtcgacgtgccatctcggttttgcagccgaggcgagacggcctcgtccggccgaaggcggctgcaagtgtgacggcgcgtgcagggaggcgtgcgacgacgagccaagtgcgccgccaggctgtcgaccatcagtctctgctcattgctgctcgtccggtcagcctttagctgctagacgcacgacgtatttcgctcgctggccctgacccggtctggcggacagaggagcgggccgaccttcggcgagcatcgagacccaggtggttgactcggccagaggtcgggctagcggtgagggtcagccagtccagaggcagcccgaggccgtttcgactcctccccctcgcccaccctcctgtgatcagaagagatctggatgcgatgcgatgcgtacgagagcgagagcgaatgaatgtagcgtgcctgtcgactgtcagcctgcgcaaggacgaacgaccggccgacgcttctgcactgcgaagcgaagcaagggcgcggccgagcttcgaagcgacggcttcctccctcctcaccctctcatccctctgccccttgccgctcggcctctccgacgctctctcgcgacgcacccccccttctcgtcttctatctgcttcgtctacccctcgggcagtcgacctggccgcggcgcccgaccacctcgccctcggccctcgccgccccttttcaacccggccgacacgaccgtctgctccggccgccggtgtgctcgaggacgcccttccatcctagcgcctggccgctctagcctcggcatcagcttctctctctgttctcctcgatggctgcccctccggccgttcttggagccgccccgccggcctcggcggctcccacgccggtcaaggtcggccagtaccacctgctccagacgcttgggacgggtagcttcggcaaggtcaagcgtcagtcctctctcctttcctttcgcttgtcgagagacggcccatcttcccggaggagcgaaggaaggagcaggagctggggctggcggtcaaggaggtaccctgctcgcgagaagggcggcggcttatccacccgggcgagctcgaccaaggcgaggctgagctcgtcgaggggtggtgtcggaaggaccttctccctcaatctatctcgagaagccgtagcacatgccagctgcccagcagctcgctcacctcgtccactttgctgatccctttgctccttttgcaccgctcgccagtcgccgtccactcactcaccggccacaaggtcgccatgaagatcatcaaccgcaagaagatcgtcaacatggacatgacgcccagggtcaagcgcgagatccagtacctcaaggtcctgcgccatccacatatcatcaagctgttcgtcttgcgcgaatccatctctcaaccgcgggtttcggagcgaggagctcgagctcgagcggcaagcttcagccggctgactacgccctcccactccctccaggtacgaggtcatcacgacgccgaccgacatcatcatggtcatcgagtacgccggcggcgagctctttgactacatcgtccaggtccgtcgctccggcgcgagtgagggcatgctcggtcggtgctgacccgcccctcctccacgccccgcgctcggccccgcagaaaggacgagtgcgccgccgacctcggttcccagcgctcccgcaacgctcctctagtctctgacctttctctctcccgcttgcactagatgcccgaggacgaggcgcgccgcttcttccagcagatcatctgcgcgattgagtactgccaccggcacaagatcgtccaccgcgacctcaagcccgagaagtcggtcgagcgcactcacctcgtgctacctgcctcatgtgctgacgcctgcgccgcctcgctgcagtctgctgctcgacgactcgctcaacgtcaagattggcgactttggcctctcaaacatcatgcaggacggcgactttctcaagacgagctgcggcagtcccaattatgccgcgccagaggtcatcagcggaaagtacgtcgctcccgaaaccgtcgcctgtgctagcagcgctgtcgcaggagctgacctgcggcttcccgcctttctccgtttggcagactgtatgccggccccgagatcgacatctggagctgcggtgtcatcctctacgtcatgctctgcggccggctgccgtttgacgacgactacattccgacgctcttcaagaagatcaacggcggcatctaccacctgccatcgtggctgtcggccgacgccaagtacttgctctcgcagatgctcatcgtcgacccagtcaagcggatcacgattgccgagatccggcagctgccgtggtttcagacgagtctgccgcgatacctccagccgatgccgttcacgccatcgagtgaaaacggccctccaatcggcgacctggcctcgctcatcgctggcgacgacccgctcaacggcgtcgacttaaagcagcgccgagggtcggatagctccgaggcgtcgctcaacccggagcgcgaggcgcgaaagcggggctggacctacacgtacgacctcggcgtcatcgacccaaagctcgtgcacgagctccaaggcaagatgaccggctggcaggtcgacgacatctgggacgccctgaaaaaggacggcgacaatcaggtcaaggtggcgttccagctgattcgcgaccatcgccggatgctgcacgacggttcgtccctttttccgtcccccttgagctcgttcgaaggcactggattgattttccgcttcctgcagccggcgagctcgaagaagacgaggagtcgcaggcgatggagagctttctcgcccagtcgccgccggcctggaacgacccgggtccgcccctgcttgacgagcctgaggaggacgacgacgaggacgacgaggacgacgagatcccaaactctaacttcgcgctgctcgactcgagtctgccaggctacgccgaaggtccgttctgtcgccggactttctgaccttccctccaattgaccaccgaatccgcccgcccacagacggcgaggacgccacgtccatccacctatcgtcgtacgcggccgctcagcaggcggcgatgagcgtcgttgcgcccggcgcaaagccgaagagccacaagccacgctggcatttcggcatccgctcgcgctcgccgccgatggaggtcatgctcgagatctaccggacgctgcaaagcctcggcatggaatggcgcaaaaagtcgccgccgccggacggcaacatcgtcgacgagaagggtcgcaaggaccattcggccgaggagaagtatgcgcagggtctcttctttgtcgagacgcggtgccgcgtccgtgacgtcgtcgtcagtaaccccgcctgtttcgctcccgaacgcgctttgctgatccagcctgctcgctcctcgccccgcttaaggttcggatggacctccagctttataaggtggacgcccagaacatgctcgtcgacttccgcaacgtcggctactatcgaacgatcccgggccagccgggctatgcgcgcctgaaagtgccgtcggttgacacgtcgccccggagcgtgccgagcccggcctcagtccggcgttcgctcgacctgcagccggcgtcgggcctcccctcgctcgaggacgtcgtcatgcgcggcggcagccgggcaagctcgttcgtctcgaccccagcaacgacggcctcgccgcccgagaagtgcaagcccaagtcggacgtcgaggttacgagcccgttcctcttcctggattgcgcctgtcgcctgatcgtcgagctcgccggaggctagtcactgggcctgctctcgcttcagccctcctctcgcctcccgtcggccctccctgccgaacctccatctcgcacggcccagcttccgactcgacctctctcaccataccgacctgcctcgaaatcgacctcatcttgcatctccaacgccccaccgccagcgccctcccaccccatcaacttagagctttctgtccgcccaaaccctttagatgcgccccgcctgtcctcggtcgtatacgccaactgtcctttgctcttgcccgccccccccgtcgaaccgaaaaaaactcttactcgctctccgctgtcggtcagtctgcctgcagacgaccaaagcgtatgtccgcccttctctcgctgtgaagctcatcaccttttcccccaccctgcaccttgatctccccaacctccctacgtccacccgttgtatcactgccgccgcccgtctcccttcccgctgtagccgatccggatggcaccttttatccccacttgtcgctcggcgtcttggacacggggtcatgatgaagctatctacacgcgctgagagaagaaggaaaaatgaggtcgcggcccggtccggcctagtggtgccggttgttgacggcctcggggtcgtcgcgtctggtcggtcaggcagaaggacgatcagcggatgtcgagctggcgacgcgctagacgaagaacgaaccccgccaggaacttgtccatgaacgtcgtcggctgcggtgctgaagggtgtagagaagcagcgttcgccggtcagtcgctaagtcttgcgaggagcacgtctcgcaaagagtcgcacagttgtcctgcggagaagcggcagagtggatgtgggacaagggtcagtatggcggcgcgtcggaccggtcggcgcgcaaggccgagccatgaggccgttcaagcgatgcacctcttgctcattgaaccagcccatgatgtgcgactgtagacgagaccgaggacggaaggttagctgccctcggccgttgaacctagcgaagatgacgcaccggcgtcttccaatagttgatcgactcctggaactcctgccggcccttgaggatgaggacgtcgatgacccggacgtccgtgacgtgcttgttcttctcaaactgctcacggaccttggtccggaggtcgtagaccgagcagggaatctggtacatgtcgatgatctcgggcgcctggagtagcagccagcccaggccgacggtcggaaaagggacgcaggacgaatgggagagcgacggacggcgcgggccgagggtcagctcgttggcgctcacgcaaggccaaagggacgacgtacgcctcggtaccatgtccggtagagcgtccgggcgcgagcggcagcctcctctgggcttgccgacgtccgggcggcctgggccaggcgagaagggatcgtggtcatacttgcgaaggggaagcgaggtcctgccagaagatggggcggtcagccggggcctgcttctgactagcgaaggctctgtcggtcatggctaacgaggagctatcccgtggcagcaccggccggtagagatgacagacgcacctgtctggtcgggagggtgcggcgagctcggacgaggcagagagggctatgatggctgtcggcaggcttcgagctcgccgaacgcaggagcttctttggcgggacgaccgacagtcagccgcaaacgaccatccggccgtccttcgtggccctgcttctctcacaccctttgcatagcctggagctagcaaagtagcctgccctgtacgtcctacacctggccgatgactagcccaaagcctgcccttaaccgagctcagctcatccgctacagcgctcgtcggcctttcaactcgctgtcggcgcctccctcacccacctcgtcagaccttcaggacaaaagtaggatcaggcagccgtaggccgacattccaaggctcctgctgctggtcagctgaattcccctcctcggcgacatgtgtcgctcgccagctgactcgagcacacccttttcggccctgaagagactcgctcgctcggcgtctcccttcgcgccccggcccgctttccgacgacgacgcatgcactcgacctgccgagccgccattggtggccggtcgctctcccggcattctgccaggtcagaagctctgcggcctgcgctctttccgagtccactggcttgggcgatcaacaagacggcaggtcactcgccagccggcttcccggcgcgagtttcgcagtggtcgccccttcagccatcggcccaccgcatccgacgcgacagtcgtccatattcgacgaccgctagcatctctgcactccctccagagccgctcgctcgtcgaggcttgcttgactggttgcagggctcgccagcccgcgagagggacacatctgccttcggcctcgcactcaaagacgccctggcacacggagccaggctgcgagcgtccacagcggcagcctccacacgagcgacatcgaacgacaaccagccggtcccggaagggccggtgcgacaatacaatgagcgtcggcgagaggccgttgtcggcggcaagctgtggtcggaccagaaactgctgcaggagtacgcctcgctcgacgttgccatcgactctgttgaccaagccatggctgtcgcccgtgacggctcgcatgccacttgcgccgctctagaccttccagacctcctccaggagctcgacctcgaccacgacctgttcgtcgcctggcagaacgtcctctcggcacccaacgtccgcgcagccgtcgtcctattccagcagcagacgtcgccattgtccatgtcgaacgacgggcagcctttgtggcctccttggctgctcaaggccgtcgtcgaccgggcagattcggtcgctgagggacatcttgcgatcgccgccatcgctcatcacctgccgtacctttcgaccggcagtcacctgcagttcacggccgagatgatccgcgttgctgctcggctagatatggtcaccgctctaccagtcctcgtcgacctcgctcttcgggtggcgcccgaggctcaattcgtcgacggccgccgcggttacctcaacaagctactcaggaactttgccttctcccaaacgtacgggatggtcaatcagccaagcgtcaacgccgaggtcgtccgtgtgctcgacaccatgatccggtctgagcctgaggtcgtgctcgagcaatcggccttcgactatctcttccaggcgccgtttctcgctacggcagagctacacgacttgctgctcattcacatcaagcgctacggcatcgagctcaaaacgcggcacgtctttgccgtgctcgaacgggccagcgtcgagggcaacgacgcgatggccgcccggtgcatccaggccatcgagacgcagcaagccctcgacaagcttcgcaccgcccatgagaccgaggagacggccgacatccttccggtctactttacgccggccagcgtcagatacctccgatcgcttgcccaaaggccggaacaggcgctggcctattaccagactctgcagcggccgccgccagagccagccgtggcggccgcttcgacgatggcgcctaaggctcggttgcgctggaggcaggtcgagcagtcgacgacggcaagcgagtcggccactgccgagcgtcagtgctgggccgagctcgtccagatcttcgtccgctggcacgccaagatgccgattgaggacatcctcgagatgattggctcgacatcgaccgacgccgctccgacctcgcaggcgagcacggtctgcgccgccgacgcggctatgcgcagcctgctcctgctcggtcggacggacgacgcgctacatctgtggcggcggtccttcgaggacgaaggtctgccgccgagcggcagctctctgtctaatttcatctgggcctgcaacaacgagatggctccggaccgagcgctcggcgtcatcgacaactgggccgtccgctacggcgtgcacgacatcgtcccaaaaacggtcgcagaggacgccgccatgcactttcagacggtcctcgtccggccgacgcgagatgccgcaactgtcccgcggatcccactcgatgcacacctgctcaagcggctcatcgctactctgggcgaggctggcggtcatgcgacaacagcccttcgcctctggcgcgcgagcgaggtcagatggggcgtccgccatagcacgggcatgcttgacgagctccttcacgcgactgcgtacggaaactgggtccgtcgcgacaaggaattatccgtcaaccacatcgacggcagtcagcgtgctccaggccaaactcatgcatttgtcgacgctgcggacgaggtcgactgggttcatgcaccgacgtcggcgtttctgcggccggctacctcggccgaggccgaaccttggaaggaagcgcgacgcgtctttgagacgatccacctgagcaattggcccgagctcgcgacggtcccgcacccgttcgacgagatccacggccccaagctgtcgccgtcgctcgtcgtcctctcgacgacgtccattacgctcaacgccgaacttcttcgtcagggattgcccttgacgacagggcctacgctcgctccctctgcccggacccgagggctccccccgccatcgctctactcggcattgtcgcccacggccgacacgttccacatgtacatcctcctccttaaacggcacaactgggcgggcgacattccgctcgcgctcgcctggatgcgtgcgcgtcagatcgtcccgcacgaaaagacgctcaagctcgcggccgatgcgctctacagggccgcgtgcgagggtccgctctggcattacgtcgtcaccgaggccgcgcgcgaggacgacgccctctgccaggaggagaacatcatgttcgagcgcgtcgccgacctcgacgaggttgccttcattcgcaagcgccggaccaagcggcccgacctcgagctggtcgactggctccgaacgtggtgcccgcgcgagatcgtgccgaataaggtccgccaggccccttttttgccgggttctccgagaggccatcgctgacgcagaccctctcttcggctccgcttgcagggcgtcgcttttcgaactctcgacgtcaaatccatccgcgctgaccgctcgccgaaccagaaggtgacgccgcagaaggccttgcctgcgacgcccaactcgaaaccgcgctacccttggcggtgatggaagagcatgcccataaacggcgctcctttgcctgagacgaggccagcctcacctcttctcgtcctcgccccaatcccccttcagcgtgcgcacgacctcaaagtagcccggtagacccgcgagctcgtctgcggcggccgcagggccggcgccggtgcgcgtagcgagttgcgggtcgagctcaagcgccaccgttggcgttacgccttggccatcagggagagtcgaagatagcttgaggcctgggttggcgtcgacgagcgtcatcggcgtcgtcgacgagaaggcgcgcgagagggggacggtgaggcggaggatgtaggtgcaggccaggttgctcttggggttggtaccggcttcgaacgtcggtccgacggggaatctaagcgaccccgtcacaatcgtctcgtgcccggcccgacggttgccgtgcgcgttcaggtcagcctcgtcctcctcgtcatcgctctcgtcggcgcccttcttgtcggctcgatcgcggctgtcgcttgccatttggccctccttctgccggcgccgattctgggacgacgtttcgagcccggcccaggcgctctgatcaaagattctcggctcgccgcgccagacgtgccgagtcgagagcacaatggcatcattgacgcagatctgctcggccatctgctcgccaccatgcgcccgggtccagacgttgcggacgagctggactttgaggtcttcaggccggaagctcgacttgggacctgcgggcggactggatgatgacgggccgttcgaatcgagcggcggtgagaggtgcagaagtgttagatggaacggaatctcgaggggcgaagggtaggacggaagatcgggtagggcgagctaccatgtggaacgtaattcggaaaacgtcagccgacagagcaggcgatgctgagtcggagtagaaacgaaccttggcgaccagcaggcccttctttcggaagacgccctctcggcgaggtctgacgacgccaaccgttcgccagccatccttctgggtcggacacggggcggggctgccgcccattcgaggcagaaggggaggcgggacggctgtcggcggggtcgagtagcttgggaggcaggcaaagacgaggagcgttctgcaggagaagaggcaggcgtaagttccggtcatgcttcaagggctgcgcgaaggcagccagggacctacttgcggtccgacttgaggaaacctttgcgccggccgacgaccttgacagcccagcgggtgaagcccatctcgttgcttgccgtctttccggccaagttacccgcctcaaacgtcggagggagatcgttcgggcctgccgggagctgcatggcaaacgggagcgtcatcgagccggcgctctcagctggctgaccgggctccttgctcttgcccttggagctcatacggctccggacgcgattgagtattccgccgtcgctggccgtctccatcgccgagtaggccggagacgcgccagatttgtgagctgctaacgtgtcgatgggagcgacgagcgcacgatcaccggcggggccaccctccgcatcagaccaaagcgcggtcgactcggagtagagcgtgcggatctccttccggctttgggaaggacgtagacggcgtcagcaacgggtacggctgtaagcgggctgcggaacgggaggcacgcactagtcttggctatgcgagccatagaacatgaagtagacggacgtctgcttgcagatgacagagacctctacagtctcaatgccatccttgcggcaggcgtccgggtcaacggtaaccgagccagcgacaaccgagctcgggccatggatgaggtgctcggccgggaagctgacggtgaacggggcaggggatgaggatgagtggaagagaggcatcgccgccgagtgcgccaggtgatttcttctgaactcgtgtagaagaacaagcgtgcggatgagcaggtgagggtcagggtcaagcaaggcgatggcggctctcggcttgaagggggccggctcacaccgggagcgtcggctgcgagcgagcgaaggcggccttggcgtgggaaccctcgcacgagtccggcctgcgactgtcgacgacgacgacgacgacgtacctcgaccgacagctcctccgctcgacgctgctccaagcctgctgcttctcgtctcgtctcggctgtacaagcggcatcggtgtacgctcctacatcctcttaggtcgccagctcttccctcaaggtagcctttagccgctccagccagcaaccccccctccagcccgatgccccctaagttcgtcttccctcgctcggttcggcttcgccgccgcccgcaccgcagtaacggctgacagccgtctctcctgctcctcagatccaacaagaaggcccaggcgggcaaggctgacgccaaagcggcggccaaggcagccaagaagctcgcccagagcaagaagcaggacaagaagctcgataaggtcgcgtccaagacgacaggcaagggaggcaagggcggcagccagcctggcaagggcaagggaaaggctgacgaggaagatctcgaggcaatccttgagagcttccagcgcgagtgggaagtcaagcatgccgtgtcggaagaggtcgccgacgggccgccctcacgccgggccaacgcgacgctcgtcgcttgtcccaccggcaactacctttggtgcatcggcggcgagtactttgacggcgacagggcgtgagtggcgtcgctcgagggaccagattctctctgctggtgggcgttcgagtcgttgacctcgtgctctttcgcgcatcccttcgacgacaggaccttctagtgcgtcatccgggcctcagctcgacgtcgaatctgagtctgaccgctgtcaccctcgctcccttcgtagcaacgacacgtaccgctactcgcccgaaaaagacgagtggaagcgcttcacctcgcccaactcgcccggcccgcgctcagcccacgctgccgtcgcgacgcctcagaagaaggtgcgcatcccttcccctacaggctcagccgcacatgctcacgtccttcctgcaatttccttgcagatcttcatcttcggcggcgagttctcgtctccctcgcagacgtctttccaccacttccgcgacttctggtcgctcgacgtcgagacgcacgaatgggagcggatcgagaccaaagtcaagccgagcccacgctcaggctgccggatggcgctctggaagaattggatcgtgctcgtaggcggtttccacgacgtcggagttcgaacgaattacctcggcgacacctgggctttcgacctgaccgagtacaagtggcgcgagatcatcttcccgctaacggcccagaagccgtgcgctcggtcgggcatgagcttgctcccctgtgccgagggcgtcgtgctctcgggcgggtacgcgaagatgtacgagaagggcaagaagacgaagggcgtcgcgctcgaggacacctggacgctcaggttcgttcctcggccttagaggcccgaatcgaggaagcccggtgagctgacaacttcctcgcctgcctgtaggatggacgccgacccgaccaaatggaagtgggagaagcgtcggcggatcgggtatgcgccctcggctcggtctggctgctcgatgacgctctgggcggccaagggcatgggagttagctttggaggcgtctttgacgaggagcgggacgaggagagtctcgagtcggtcttttaccaggacatgtgggtcttcttcatctaccctgccttgcttctggagaggtgtcggctgacacccttgtcgatttaggttcgcctacacgctcaaccacccaggccgctggatctcgctcaacctcaagaagccaaagaagaaggcgggcggaggccggcgcaaggccaaggcggcccaagccgccatctccaatctgtcgagaggcgatggcgacgatgacgacgacgagcggatggaaggcgatgacggcagcgccgacgagcaggagcaggagggccaggtggccattccggagccagttgctgcccctgtcgaggacgacgatgacccggacgatccgctcaagactgttcctctagcccgatacaacacgatggtcgccgtgcttaaaaagtatgtcctgtcactgctccgcgcgtagcggttgccgacgcctactgacaaccccttggcctctgctttgatcagcacgctttatctttacggtggcatctacgagaaccaatcgcgcgagtacacgctggacgacttccacacgctcaacctcgaaaagctcgagcgcttcacctgcctgcgggcgtccggcctcgaggaggaggagtggaacgagtcggacgaggacgacgactcgtctggctctgatgaggacaatgtcgaagactcggacgacgaagagggcgacaagcgtcgccggcggcgaggtgacgacgacgaagacgaggacgccgagatggaaggcgccgagtacgtcccggacgcgcccgaagatgaggaggagcaagaagcgtacgaggacatcgaggtcgacgagaacggcatcgtcctcagcaaggccgaaaaggtcagtcactcctgcagcctgtgcaaccttcttgtcttcgctgacacgcttctttcctcgtagcttgcccgccaggaggcgctcacaaagcaggccacagcgttcctcggcgtctcgcgggacgccggccgttcggccgaggacgtcttgtcgactccgcagccgggcgagagcctccgccagttctacgaccgttcgcgcgagtattgggccggcaaggcccatgcgagctccgacaaccggggcaagatgctccgcaaggacggcttcgaaaagtgccagatcaagtacagtgcgttgcctcgcagaatcttcgcccggtcgtacaactgacgagagccctctcttgcacacagacgagtacaagcccatgcttgacgagattgagcggatccaggcggcggccggtctcgaggccgaggacgtgcagaagggcggcggcggcgcagcgagcgccgttggcgagggtagccgcaaccgtcggtgatctacatggcctgacactagcggagaaagcagagctgagagccagacaggataaaaaggaggtgagacaggacctcaccgcatcgcatagccgccgccagtcttctcgacgtgacatttggcgcataggacctggccgcggtggtcctgcaccttgccagccgcaatggtcgccgagcagttgctctgcaggaggcgaaagggtcagatcagtcgtagtcttggcgccagtcgatccagtcactcacgcatcgaaggcagcccttgtgccatctgagggaggcgagccgcgcgaggtcagcgttcagcgacggccaaggcaggagcgagtcgcattggagacgtacttccggtcgagcgcaacgacttgttcggcgtggtagaccgtcttgccacacccaggacacttctcggtgtcgccctcgacccgccagccggctcttgtgcccggcgtcgagccaaccgcgacgccgaagcgcgcgccgttgcgtgggctgccgcccatcacggcgaggctggccgcgctccgttctcgcgccggctcaatgacgagcttcttctcttctgttcgagcaggaagcgcaggaggcacggaccgagcgctgccgccaaagttgggcttcggcgggacgggtggtcgcgtgagatacgactgagctggcggcggcggtacggtagctgcggatgcgggtgatgaaggtgccggagcggacgacgagggcgacggcatcgtcggatgattgaagtgtcgcagatcgcgcgtcctgtcgagagggcgacaggtcagaatcagtctggcggcgaggaggaacatgtggcaaggaaggggcgcgagggttcggccgtggccgccaaggcgctcatcgtctcgcaagcgaggaggcaggcgaccatccgttcccctagtctcaactagctgacaacgagcgagcgcggacgtacccaaagagctggagatgacagttcttgcagtagggctggttcgagatctctcgtcagtcggcgtcatcgcgggcgacgcaagccaagggacgcacgtcgtcgtcatgctcgaccaacaggtgcgaatcgagccgcttgccgcagtttgagcacttcaagcatgccttgtggtaggtcttgccagccggaccgacgacctgctcgacatggtaggccggcgtgtcgcagcggctgcaattcaccatttagacggctgggtcggaggtgggaggcaccagaggagggtgacgtcggtaggcggtgagagcggcgtcgagggcgttggcagatgtaaatgaggtaggttgcgatcgggtcaggagcagcgagcttctggaaaagcctctcgtggtcgtgcgagtctgttagaaagcagttgaggccgcgtgtgcgttgggaggaacaaaccatctcaggccggctcgctcacatggtccgaggcaatgtccgagggggcggctatctcttgctctctcccgaccatcacttcccccttcagctcctcgtcgcacctatggcctcgtcgcagacctcgcaggcactcggctcgctacgcaacgcccgtcgcgtccagcaagaccttccgtgtccgacgactgcggctggcggcattagcatcagcggcggcggcgggtcgacgcgcacggcccctgtctcgacggctgtgccgtcgacggcagccgctggaccaggaccttcgatggcgatggcgacggcgacggcggcaggggccgctcacgaggttgtcgagctcgacgactcgtcgtccgactcggacggcttccagatcatttcggtcggctatgggccctggaacccgcttctcccgactcacccggcggtgtgcgtccaagcgcaagccagcttccctttggcccttggactgaccttcaccttctctgtttatccctgtagtgcgtactaccagctcgagatcatctcgctcacgctcgggccgtcatctcggcgcggcacgtcgcaggctgcgtcggacgagggcttcgcctggccgaccgaggtcgggctcctgatgacgctcgagtttgtgagtcgacgctgctcgtctttcctccgttcaggggtgccgctgacgctggccttacgtctattctttacatctcttgcagggcaaggaccggcaattctcgcagtaccgccgcggccggggcgaggagttcaacatctaccgcgttgagcccgtccaagactcgtcgaaggcgctcctctcgatcaagcagccccggcctaactactcggtcccaatggcgatgttcggcgaggtcccggaagaatggccgtttgccgacccaggcattcgcgagggcgagagcgcacgcatccggattgagctcaacagcctccggagccgggccggcccgcacaaggccaacgagtgggtccacgaccagctcaagacgtcgtcgtcgtacgccggcatcccgccggcggcgcgcgagtacgcgctcggcggcgaccttccattcggctttgtcaacattccgctctcgcccaggctcgaggaggtcgtcccggccgactcgtctgttgccccgctgttctgggccggcaccaagattgagcccaagccccagtggaacctccgcttccgctggcgctgcaattctacggccgcctggcgggccgaggcggagaactaggcggccaacctcgcctcctcccgccgacccctcgacactcgcctaagcctcgactcgcatgccgacgcccaagcgtcttccagccctctcactctcttgactcgaccattccgcagctccaacgacgatcgatactactcccgcagcccctccaccaatccctctcccaccaccctcgaccctcgtccgccaccacatgcacccgtgcgcgcctccgaagcacccctttccgtctctctagcaacttgtctggcttcgcatgccgacgctgtccttctaccttaacgacctgaacgaatcatgcccccctttctccctctttgcgacgagcgtcctgatgagacggaacattgcgcaaggacgcgcggcgcgtctgctgacgccctccgccgtgcctgccgacgtcgaccagctgcactcttgtcccctcgccagcctcccccgcctctcgcgccagatcgcagctcgccagggaccgctcgacagcttaggtctacctcttgccctcctcgcgtctgcagtcgactcgtccggccaagcgacccccaggctcgacctcgagctcgctttcgcgcggcctcgcccctgcccctcgccttcgcgcggcctcgccccggcccctcgcgtcccgctcgtcgccgcctcagccttacgatgtcggccttgccctcgcccgtgccagccccggccacgcccgaggaggtcgagacgtactcgacctgggcgctcacgatcctctgctcgctccttattggcgcgctctggatgtcgtattacctccaggtccgcaagattagggcgattcacgagacggtcgtctccatcttcgctggtacgtctcgttgcgccgaacgatcgggttcctctcgagtgactcggcgctgccagggattgtgcttactggtagcccttgttcccgcttgcgtctgccaggcatggtcgtcgggctcgtgctgcggctggcgcccgggcacctcgtccgagagatgctcgtacgtgcctctgcccatcctccgcgccttttggcaggcggctgacctctagcatcgcctgtctcggacgccctcgggtcgcagacgttcaagcacacgctcttcttcaacgtgctcctcccgcccatcattctcaactccggctacgagctcaagcaggtgcgcgcgcacgccgcagctcgctcgcttgctcgagctggccccgaccttgctcgtatggatctcgctgaccacccctctgcttgcaggagaactttttccgcaatttcggcgtcattctgacgttcgccttccttggcacctttatctcggccgtcggcctcgggtgagtcgcgccctcgccgctgaccgcctgcgcaccagccgctgatcacccctgcctctactcggcaacagcgtcctcgtctacctctggtcgctcaccgggctcgaaggaatcaagctcacgctgatcgagtgcctgatctttggatcgaccctatcggcgacggacccggtcacgatcctctccatcttcaactcgtacaaagttgacccgaaactctactcgatcatctttggcgagtcactcatcaacgatgccgtcagcattgtcctctacgagtgcgtctgcagccatcttctgcgctcgaagtggccgtcagccactgacactgatgccccttctcacacaggacgctctccaagttccacggcgacgacgtctttgtctcgtctttcttccacggcgtcgccatcttcctcctccagttctccatctcgatggcgctcggcgtcgcctttggtctcgtcacgtctctcgttctcaagcactcgcagctcaacctctacccgggcatcgagtcgtgcatcgtcacgctcgtcgccttcacctcctactttctctcgaccggcatgcacatgtcgggcgtcgtctcgctcctcttctgcggcatcacgctcaagcactatgcctaccactcgatgtcgcgccggacgcagcggacgaccaagtacatgttttcgatcctcgcccagctctcggaaaacttcatcttcatctacctcggcctcaacctttttgcccaggagatccaggtcttcaagccgctctttatcctcgtcaccgccatctcggtcacggccgcccgctacgccgccgttttcccgctctccgaaatcatcaactggatcttccacgctcgcggccagcgccacgaggagctcccacactcgtaccagatgatgctcttctgggccggtctccgtggagctgtcggcgtcgcgctcgccgtcggcctcacgggcgagaacgccgacgccctgcggacgaccgtcctcgtcgtcgttgtcctgacggttatcatttttggcggaacgaccgcccggatgctcgaggtattgggcattcgggtcggcgtcgaggaggaggacgagtcgtccgacgaggagggaagcgagacgtggtcgcacgcgccgggttcgatggccctccaagtcggtcccggcagccgccggtatgcgagccgagcaggccgaggcggccgcgccgcacgaggtgtctcccttggcgggggcgccatctctggcggtggctacgtcgacgacgccgacgacagccagccgtcgtcgccgatcagcacccctcggctcggccacttccggacggcctcttccggcctcgacccgtacggtgcgggccagccgccacggtcggcgaatgcaacgctcgcccgtgcctactcggccgcaagctcctccgaggaggacgcgtcggacgacggcgaggccttccccacgtacgacggcgccgtaggctcgcgatcatccgatccgctcggcgctgaggagagcggcgagtcgccagggacggcaccgcgcgagggcatggtcttccgcgatggccagtggttcaccaacctcgacgagcggtatctgctgccactcttcaccaactcggtcgcctcgcgccggcatcacgccaagaaggcctcgcgaaaggcgtcgtcgctcggcctcggccggcgcgaatccgacatgcacgtagcccggacatcgagcccgacctacggcggaggtctcgacctcggcgaggcctttgacgagcatgaggaggatgtcgcgaccgctcggcagagccacctgctcgccgctctcgacccggccgacaccgacggcgacagcgagaatggcaagtccaagggcagcgcgctgagactcaagtcgacattcaggtgtgtgtcgagccgatgcaggcaggcagctccgcaaccagactgaccgacctgcccctctcccgtattagcggctcgatggttgacttctttaacggctcgagctcggcagcatcgacaccgccggcgacagcctcgtacggtacgccccgagcctcgctctcgacgacgacgggggccagcatctcgcgtccggcctcgggtggcgctgggcagacgaggacgggctgagttggggcccgtcgtcactgaatcttgtcaaaggcggcctctagatgcgctttctgtctcgcttgatgcgaccgctgcagacggtcaacgactgcgagagggctcgttggtctgcccgcggccaagggctgctgttgattgagactcgtacgtctgctgtcgtggtcgccgacgcgaggcaggtcggtcatcatcgttcgtctgttgcatccggacatcctcgcggagccagtcttggctcgctgtcgggcatcatgcttgcacccggtagtgaacgccgagcctcaagtctgtcgacaatacgcttcatttgaatcggtggtgacagaagcgacacagcgccggctccatcggcaagcgacgacgaaaggggacaaaaaggggggccccgcgccggtcggctgcgggcgtgcccgccggctgtagctttcgcttattcgcgttgagccgtcactcctcctcgacctctctcccgactaacttgcgatggatagccggcgcagggaggacgtcggtcatcgtcgagggcgcttggtcgcgagcgagcgagcctctgggacgcataagaaggggggaagagcacgtcccgtcctgctgactcttgctcacaacaactgccctccctcccttcccttccctcccttccctactcgcccgctcctttacatactctcccaatcgcagctccgtctcatcatgtcgatccagatcagcccagataccagcaccgtaatcaagtcagtctttcttgaggttctctgcccgcctggtatcgatcgaggctgacttcttggtgccttgcagctcgatcgtcggtagcctgaacagtgcgccagcaccctcgatggcctcgtctcctcatttgagctgaccctaccctgcctttcgctcagatcttactggtaaggtagagtactacgtctacgggttcgtcttcctcctccccacccaccttcggcctccaagctaacctcgagcgttcacctgcagctacaacattcgcgtggttcgtcggcttggcctcctctcttgatcttgatcaagtcactgacgcgacgccgcatgtcacctcgacagtggacggccgctctcttcaccgcggcctttgccctcagccttgtcctgcacctggtgcaggcccacttctctcgccgtcgcttcctctactggaccatttgtcttggcgcggccctcgaaatgggtggctgggctgctcgactcacctcgggcatgtcaatcacctgggtcccgatgtacggcggcgtatgggacagcaacgggcaggctttcctcgctcagatcgtgatgctcatcatcggccccggtacgacgacctcctgcgccctgacagtcccagccgctctcgtgtcctgaccggctgccctcgcctcaacagctttcaatgctgccggcctctacctgatcctcggcgagatcatccgcctcctcggccagcgctactgcaagcttgagcctcggacctacctttggatcttttgctctggcgacttcctcagccttctgatccaggcagccggcggcggtattgcggcgacgtcatccaccgtcgatatggccaacatgggcgcctacatcatggtggcaggcgtcataattcagatggtgcgtccgtctccgaagctctcgttgatcgctgcacctgacttgcccgccgttgtcgaccgccctgtaggtcgtcatgctctgcttcaccggcatcctcgcagacttcagctaccgctacatgaaggacaagccgacgactcaaatctacccgttcgcctgctttcgctgcggcaaggaccggaaggctgtctcgtccggctcatcgcagcagacgacaggcgatggcgccgtcgagcacacctacggccgccggagcgagcgccacgtccggctcttgctcctcggtctctccatctcgaccctgttcatcattatccggagcatctaccggtgccccgagctgctctcgggttggcgcggttccatcatcgagaaccagacgctctttgacgtttgtgacggcctgatgatcgtgcgtcgcaccctcctgtagcttcgctggccgttcgagatcttgcagctgactttctagctttcattccctcagctgttttcactcatcaccctcaatgtcctccacccgctctggctcctgccttgtctcgactcgcagtcgagtccggcactgccgccgactgccgttgacgaggccaagctctaagggccgcgacgctccttccattgctcttcccttccctgtactcgtcctcggcttgtctcctttccgatcgaccgtccgataatatgtctgccccctctcttcctttttcgctgatgtagaagcagatcatcgcatcaagtatgaaggcgggcatgggatgggaaaaggtacagcaagggcgaacggagcagcgatattgagattgcgttgagcacggtcgagcagggccggacgactgacgggcagtgaggggcaccgtcagctcggatatcctgacagtcggctggagatggccaaagggacgcacctcagtagtcgtagttgccgtaatcgtccccttactcctcgccgtatgggtcgccataaagggtgccgtagccacctccccaaaggccggcgtacttgctgcgctgaacgctgcaaggaaagcgaaaaagtcagataatcgctcgtttcgctcgggccaggtcgaggttgcgttgtcgcacgtcccgttccgccgccgggtcgcctggctcttctgatggcgctgctccagcttgatcttgtgctgggtgtggcccgcgacgccgccgaagaggcgtagcgccagtgactggagcgtgctgacccgccagccggcccggccgctggcgcgcgtcgtggtcgggaccgacagcaagtaggcttcgccgagcttccagtaccgctttatgtctcccttggtgacgcacggagtgttgacgagggcgacgacgagagccctgcatgaagatgaaagcgggtcagcacggccccttttcgcgcaaaaagcggatcacaatgcaacgcaccgccactccgaggggaatgcgtcgtaaagctcgagagtacttttcgggctccagccactgtaaaaaagatctgagggtgagcaagctggttctttaattatgcaagcgaggagttataccagccgtagtgaagcctgcggcggcgctagagctgaggttagtcgagcaaagaggggcgcatgatgagaggaacgtacttccgctcctcgacagtcagctttgagaagagctcaccccaggcatagatgctcgggccgacgatcatcttgccgcgaatggggtcatagcgtcggccagacaaggggtcgttgacaatcgcagccttgccctcggcctcaagtctggtccgctgcagcttgcccttgagccactcggcctcgttgatgccacaccgagcagctccaggtgcaacggtcgggttgctgaagatgtgacgggcggccgagagggggcgttcgtgtgggccgagctcggtccggttgcagcgcacccagtgcgacagcttgtcaagcgggtacatgacctctttgtccgaggtgatgacgctgatatccgaccgttcaaggcccttggctttcgggacaagagcttgaatgagcacctgcggtcgaacgctcgagcgtcagcggccaaaacaggcggctctgcaacgcagcgacgaaggcgcacctgccagacgacgtcgttgtagcacgaccggaagtggcggcaggtcgaagcgagagcgagatgatcacgcagctggacagtcgttcgagagggaaaagcgctctagtcagcggaggggactcatcgtcaggacgttgagtcgccgcgcacctccaggtcccaatcgaccgagacgatgcagtccatcacttcgaccgggaagcgctggaaggaggcgtccgaaagcgggccctcgagctccttctaggaggcgaactaagagagacgagcagcacaagcgtcagcgctcgaggaaatgcgggatgagctcgcgagccggcgcccctgacgaaccttgaccttgatgggcttctttgcctttttcttggtcggctctggctcagccatcgcgtcggccttgcgcttgccgtcgggagccgtctctgtgttaaatgagaagggcatcgctcgcgtcagtcgcgtcttgagtcaggcggagggctcgagtgagggacgcaccggtgcctagctcggcgaacccctgagtaggtggctgctcggcggcggggatcggggtcggtgcagccgagctggatgccaccgagggcaactgcgaggttgagtgctgagtagggctgctcatgctggtctgttgggctcgatgagaggtggcaggtcgtgttctgaagcagctcgaggtcggtctctcttcccttggagctcttgaaccgctgcgcgcgcacggacgcggtcatgcgtacgaggcacctgtcccacctccacatggacgcaacgaagtctcaatccctccccaatgctaagacggctgaaatgagagggacacgcgcgcgcatacagctcggttcttgaagttggcgtcgaaacgaagagttgcaaggcagaggcatctgatcgccactactcctgcgcaggcgaagggctccgccgccggtagagtctcagcatcgacctgaggcacagagcagcgcgcagaaggatcagtatgagggagcgacgtcgtgagggggcaaagcaggacggaccgcatgttctcgagccggaccgggtagccctttccgacgccatcaggcacgcggaaccacctgctctcctccttctcgacaatctcccagtcacccttaccgccacgcccgcccgcgagcacgaggtcgagcagaaactcgagcgggaactgcttgggctcgccgtctgatgatgagggcccgaccggcatcgcgctgaacgagccggccgactcgaccatgagcagaagcgtccccggcttggcccgctgcgtcagcgacgccagcagcttgagcgtcgccgcccgcgaggcgacgaggagctcgtgcgtcgtgtaaagaagtgtgatgaagtcggcctgctcgacccgcatgttctcctggccgacgtctgacagaaggtcgcgccggaggtagtcgaccttgagccggttctcgccgacgccccacgactcgcggattgaggctgcggccgtgtcgacgattgggccgaacgcggccgagtcgacgcactgaaggtcgacctgggccggcgttccagagctcaggacgagcgaggcgacggcaaagagctccgagcagggaccggccccgagcgagagaatgtttatgctgcgggtcgcgacgtgcgcgtccgagccgagtgagagcgagccggcctgctcggccagtgcatcgaccgacgttgccggtggtgccatatcctcctcctctgagctctcctcgtcgctgtcgccctcctcatccgagtcctccgactcgacaacggccgggaccgagatgaccttgtcctcgccgcgcttcacttgccagagctgctcgcagtagtcgccaagaatgtcgcggtaggccatggcccggccaggcacccagcgagcgacgtacgccctgaggtactcctcgctaccgaacgcctttgggtaatcgcgctcgtacagggcgcccttgacggcctggacggtcgccgagaacgtcggggcggcaaaggtctctgctgagtgcgactgcatcaggtcgacgagttgctgatacggtgccgggtcgagcttctcgacgagcggcgcttcctcttcagcctccgtcgcccgcgacaggacgcgctcctgcttgactgtggtgaggccggcggggcgacaaggcggtcagctagctgcgcctcgcttggctgctcccggtcggcgacagcacacgcaccgaggcgctccttctttttggtcttctcggccttctgccagaccttgtagcctagcggctcctagaatgacaggcagggcgacgggcgtcagaaatgatatttgctgcaagcccacgggttgccgtgttcgagctggtcgcgcaggcaccttgttggagaagaagtcctggagagatccggaagcaagccctttcagcaggcagctctcacacgagcacgcagcaagagtagcagcaggcagaacgcaccttctggttgttcttgggcatgttgggcaggggaggtggtgtcgaggtgcgtcccgtctgtcgtcggctcgaggtggccgtagtcgcgcgtccattttcgagccggccgaggttcccacggaccgagctcgagctcgacctccctgccgtccatcagcctcgctgacgacgcccgtctcttgcgtccccatgagctcaagtaggacgcgtcgaccggttttcagctgactagctctgagccagaggctcgtcgtgtcaaagtctggtcgtttggatggattgcggacgacagggcctttgatccgttgtgcctcgagctcgactctcgctcagccggcctcacactctgcacgagctcgagaagctggctttgtcttgtctgttgctctctcatcactgaccagcgcagtgcgacagttcactccagctccggcacttgctacctgcggcagccggcgtctttcagcgacgtgtcgaaggcagatctgtcatccgaaacggctcgcctctcgcgcctcaccccaactcgccggcctcgcttgcccacctcacacgcttcatcgcctcgccaagtgacaccgaaatatcagtcctccggccgaccggcgttgcctgtcgtgcgcccccaacgttgaatccgaaagcagttgcatctgcagctctcacctgacctcgttcccgctcgcctttaaaaccccggcccgcctccacagagtcggcacgacgcctcgtccatcgagaactcggtctcgcttctccccgccgacgagcgcttgccaatcgtcctcgtccccaccagaccatcgagatctttacgagctaacggcccccgatgagaggccggcctgttgaggccccgtagccgcagcagctggacccgcttctcactttactcgcaagccgacgtcggcctttaggacctcgccgcgcttgctccctcccagagcagcagggagggactgagaggatcgtcgagtggtctggggtagggatgagcaggtcaaaccgccgagctgacgagcgggccagaggtctgtacacggcccgagctccggagctggcccgaaccgaagctgatcttcagcggtacaaaaagccggacctgtcgagggacgagggggggcttcttcccttcaaccaaccccttcccccctctcctcaagatgcgcttctctcccgtcatcgtcgtcgccctggcgacgtacctcgccgactcggcctcggccacgcccttcctcttccctcggcaggcgcagaccgacggcggcctcaacgtcaccgacccgcactctgcgccggcagtccctgccgacttcaccagccccatctcgaccggcggcgtcgcctggaccgatgcttacaacaaggccaagggcctcgtcgaccagatgacgctcgaggagaaggtcaacatcacctcgggcttcggtggtccttgcgcgtgagtcgtgcttaactcttcacgccagccagccttcgacgctgacctgctcctatgttttcgcgcgcagcggcaacaccggtactgtcgagcggctcggcatcaagtccatctgcttcaccgacggcccggtcgggtacgtttctgttgttctgcaatcgatagatgcgagatctgctgctgatcttgcgaccgctttcctttcgtcccgcagacctcgtccggtcgtcggcgtcacgcagttccccgccggcgttactgtcgccgccacctgggaccacgacctgatttacgcgcgagcgctcggtatgggccaggagttcaagggcaagggtggatcccctgtttctctcgaagcggactgcaatgtcgcctgacgctgacacattgtcatactgcaggcgtcaacctcgccctgtcgcctgtcaccggcggtcccctcggtcgcagccccctcatgggtcgcaactgggaggtgcgtttttctgtctgtttattgcagcaatcccggcaacaagcgctgacggtcgctctacaccatgctcacacgcagggcttcgcccccgacgtctactttaacggcgtcgcgtccaaactgagcgttcacggcattcaggacgccggcgtccaggcctgcgccaagcacttcatcgcctacgagcaggagtcgtaccggacgctctacctcaccccgcgtgagaacaacaagacggcgctctaccagcaagtcgactcgattgtcgacgacaagactcttcacgagctctacggacccggtttcgctgaggccacccgcgccggtgtcgcctcggtcatgtgcgccgtgagtgctgtcgcttcgtccttccactcaagcgattcgccgactgactttgccgcccgcctgcagtacaactcggtcaacggcgagcacgcctgcgagaactctgcgctccagaacgacttcctcaagggcgagctcggcttcgccggctacgttgtctcggactgggttcgtttcgtgctgctcgactcgtggctctcactttgctgacgatctgaccttctcactataagggaggaacttggtcgagcgacaagtcggctgcctatggccttgactcgagcatgcccggcaccggctacggcggcgtcctcggcgagttctttggcgaggagctcgttaacgtcacccgcgccggcaccgtctcggaggcccggctcgacgacatggcgatccgcgtcctcacgccttactaccacctcggccaggatgtcgactaccccgagagcaactttgaccagggctcgctggccaaacagggcccctttgctgtcaacgagaacgtcaacgttcaggctgaccactggaagatcgtcaagcagattggcgaggagtcggcgacgtgagtgtctaccttttgccctttccgaatctgagcaagatcgagctgatcaatcccgctcgccctttctagtctgctcaagaacgctcagaactcatcgctcggccttccgatcaagatctcggacgacgtcatgatgcgcatcgccgtctttggcgacgacgctgccccgccgggtgagcttctgcttgtcaaccctcttgacagctgtcgcgtcctgctgaccctggcctcgtccgcctcgtctctgcagagcacggtctcagcggctgcggtggcgccaacacctgctacgacgaccccggagcgtcgaccggcatcattggcgctacgaccgacgcccccaagccggtcggcaacggcaccgtctctgtcggcggcggcagcggtgctggcatcgccccctacgtcatctcgcctctcgagggcatccttgaccggacgcgccacactgccgtgactgtcgacttcgaccttgccaacgaggccgttcactacccttacatcaccaacgtcgcttccatcgccgacaagtgcatcgtctttgcttcggccttccaggctgagggtgcgtccccactcctatgggtctgggtctggtgataactgactgtttcccctctcttttaggcgccgaccgtgccgacctccagctcgctcacaacgccagcggtctcatcaacgaggttgcccgcacctgcgccgacaccatcgtcgtcatccactcgggccagacggtcgacatggaggactggatcgagaacgacaatgtcaccgccgtcgtcttcgtgcgtcccccctcttggggggggacgatcgggtctttactggttgcgcgcggcgatgacctctgcgcgcttctgctgcttctcgcgcgtccactgggcagccttgagcctcgccttgccggcctcctcgagcgcctcttgcttcttcgtcgccgctgagcgcatgcacgtcccccgcccgcggtcgtttcgcgcagaggcgaacggcgagcaggcggcgtacggctcgcctccgactgctgctgctgagcctccgactgctgctgctgatgggtcggccgagccgatccgggacgagagcagccggccggactcgttatcatacacgcacgcgatcggttgcctgtggcaggcgggtgggaaggaaggcgaaggcgaggcgcgtcagaagtgtgggaaggcgagaaaggaggccggaggaccaacgagtcccagtacgaggcgtagcggcacgtcgtaaacttgtcgtcgccgcccatctcgccttgcgagtcgtcggcgtcgatgcccgtgtcgtccgggacctcgtccgtcaacgccgggcaggtgtctgcgcgaaatcgggagcagggcagtgtcagctatagattgccaaagggcccgtgaagctcccttagggaggacggacagtagcagccgggcatcgtcttgcccttcagattgaagcgcgagaactggacctgattggccgggcccgggcctgcgatcgggaaggccattaccggctcgagcgcagccagcgacgagagtgcgaggaggaaggccgaggcggagaggcgcatctcggacgggctgggcaaaagcttttgagaaggggggtgacgcgggagggagcgaggacgaggttgttcgaaagagctggaggaggtgcggaggatcaaagcccagcttgatcggggtggttgttgcgagtagagcgagagcgagcgagcgatgcgagagaggagctgctgcgagggatggacaggtgggtatgtgagagagagagggaggaaaggagcagcagggcccgtaaatctgggcgagccctataggggagccagagaagaggggaggccgggcgtgtctggcggtgccttgagatgggcgcggcgcaagtcagccggggctcggaggaggtcagatgggtgcaagcgacgggaaccctgtagccagggcgctcatcagcttggagcagcagcaggggaggagctgtcatctgcgggaggaggcttgccaggtggccgtcggagggtcggtcggctgggccggagcagttcacgcggccggtctcagccgcgcccgccggatcgatccgcgccgggcgcgcagcagcatcgcctaagcgaacaggcgcgcgccgtcttccaaagtcgcgcctcaaggtcgccggcgacctgccccctagctagccaattaatgtcgacgacgcaggctcatcggaaataagggctttgagaaagcagggtcaagggaaagcgagaggctgaggcgagaaggagcggcaggaggtggctacacagaggggcgaaaggaaggaaaagggcgggaggactctggtccgaaaaaggagcgttgtgcggggtcgtgcggcaggaagggaagaattggaagagcagccgtggtatgcgggaatgagagagagaagaagggaaggattttgtgtgtggtgtgggtgcaggggaatggggcagggcaggcgagagctgagcgggcgcgagaaggaaggaaagggagggaggaaaaagagtgtcttccgctctagatccacgtcgtcgccgacgaatcgatcttgagcgtgttgcggagaacgagcgggacggcgatgagggcggcaaagaaacaaaggacaagcacgtaaagggccgagtactgcgaaggtgatgacgagggaggggccaatcagcgttcaggtccgtctggcgaggcagcctcgggaggggcaagacgcacctttgcgacaatcttacgccgctgcgagcgctgcttgaacgagtagattggcgcccggatctgcttcgagggcgcaagccagaagagcatcaccgaatgaagccggtcgatgctggagagaagggccgagccagacgtcaggacgcttgccttgcaggcgcggaagggcgggcgcgacgcacaaggggatgcagaaggggatcgagaggatgatgagcagcaggtggcagatgatgaagtcggtcgcaaagagacccatctgtcggcaaaggcaaaggggaagggagggtcagcgttggtcccgtcaggtttttgaaagacagaggacgcacctcaacgagcttgacaacgaactcgcgggccggctgcgagacaacgtgcgagcccaggccgcggttgtaccagacgccggtccaccaggcccggttgatctcgtcgtgcttgaactctcgcgagaggaagaaggcgatgaagaacttgtagaagaagcgctggatgaagcacgttgcgacgacgccaaggacggcgtgagacgcctgccagacctcgaggaaccagaggagctcaaagaagccgacgaggccgacgaccgagagcccgtgggcgagcgcggccatcgtcgcgccaaacttgccgcagcagttgttgagcatcggcccgaggaagagcgacgtcaggaagaggacgatcaggatgaccatgttgaagacgatcgggccgagcgagatgacggcgattcggaggaggcccgagacctgctgcgagcccgagggcgtgaacctgggggcgcgagagaagaagagtcagcatccgggggctcgaggctcggcgccagggagccaggccagagggggagacgcacgacttgacaaagaggtagggcatcgtcatgatgacggccatcgcgagcgggccgagcagctcggcgtagatgatggtccgccacgaggcccgcgggacgtcggacgcgagcttctcggacgggtgtccgagcttcttgcgcttgtagccggtgatcttcgtccgcgagagccggcagtagccgacccacgagttggcgtggtggcgcgagttgccgcgcgacatccaccgaaggaactcgcggtagtcgatgataaagtcggagaaggagaactggtgcgggttaaagatgaagggcgagaggcagagggcaaacgtcgtgacccagaagtaggtgaaccaggggatccagagggccgttgtgacgtagagcatgcacagcgcgagccggaggcccatgtagatggacgggccggcaaagcgcgagtagaggatcgcaaatgagttgcgggttgtcgcaaagccgcggccggtcgcaatgtaacgcgccccgccaaacgtcaggttggagaggatcgactgggtgtagatctgggtcgagaagacctcaaagacgggagagagcgagccaaagtgcttgccgagccggaggagggccttgccggcgccgcgctcggtgagctctgcagccagcgaggagaggggagaggagatcgtcagttgcgaggcgataagtgagaggaggggggaagggagacgcaccctggaggaagagcggcaggaaggcaatcatgaagacgaggaagatcgagatgatgcagcgctcgatccacgaaaagacgggctcgaggccgtagcagccgctctggccagcgagcaggtcgccattccggttgtacttgcagagccggagcgactggttaagcgaggccatgtagacgactgcgcgagagggaggaaagggcgagggtcagtgagagcgcgcgcgcgcgggatgcccaggcaggggaaggatactcacgcgtgacgacaaagatctggacggcagtgatgacgaggatgttgttgatgtggaagcccgggtgaccatagtagaaggtgaggaagcggtccatcgggagctgggtgccgaggtaatagtactcgcgcgagagcatctgctcgcccatgccggtaccaatcttggtctggaaattgaggatcgtcccgaagcccatgtctcggcccttgccgcactgatagtactcggagtgcttgatgcggccgccgcggccaaaggccgtcatgccggcatagatgtcctcgttcaggtggaggcctttctgggcctttgagacgccgccgcgcgtgttcataaagatggcgttgaggaagtctgggtggccatagtggagcttgccgccgatccacgacatggaccgggccgcgagcgtgccgaacgtctgctccttgccggcagcaacgtcgccgaggacgccgatgtctgagccgagcgcaaagcgagggggcgagtcagcacgagccagcgcgcgaggacagcgacgacgacgacgagagcgagacaaagcgaactgactctctgagaagatgtactcgcgcgcgccgacgatggcgaccggcgccttctggaactctggcgcgccccactggccgtaaggcgactgggttgaggcggcaaactcctcaaactcgccgaggacgtttcggatcttgaggcactcttcgaggtagttgtcctggttggcgtcaatcaactggaggtactcgccccggtagaagatcatcgcgtggttctgattgtccgactttccgtcgccgaggatcgggttaccgggaagctcgatccggaacttgggctgccggccgccgttcgggaggatttccgaatggccgtcgatgagggccgagaagatgcgcatctcgccgccctccttgcgcggaggctcctcctcgaggtaggcgatctggaggtccgggtaggcccggagcaaaaactcggcgttctccttctcctccttgttaaacttggagtagcgctgcatcgaaatgacaaacttgaacttgcggcggctcatgcgctcgagctcgcgctcgagcttgtcggtgttgccgccaaagagctggacgacctcggggttctcgacccggtagagtagcttgatcgcctttgagtagttcatgaagcccgacacagtccggtagagcgtctgggcccggagcgacgcccagatgcgcgtccggagcgtgtactctggcgcagccgacttgaagccgacagtgtagaagggaatgtcgtcggtccgcttactgtcggccttttcgtcggcggccgactcggcaaacgggttgccgccggcgaggtacgacgactcctccgagagaattttggtgtccttgacgaagttgtcccactcgaccgggtgaagctgcttgaggtactcgagcagcgtcacgcgcgtgttctggtcctcctccttgataatctcgcgaagcgagagcaaaatcttctccgagtagtgcgggacgaggacagtgaacgtcggcatcgcgtcgacgggcagcggctccgggatcgaggtcgtgagcgactgggcgaagaatgagatgcgacgctcggcctcggacccggccgggaaaaagtcgtgtttggcaccggcgtcgtgctgcgagatgaagaaggctggcgcccgaagcgtccgcttgccctcggcctcggacgtcacctggtggtagaggagcttctgaacgtggtcgatcgagaggaggtgctcgcggtacatcgagatgacgatcgcgttccagacctgcgagacgagcaccttgggcttgtactttggctccatgtcggccgtcgagagaatcttagcgtagatgcgcttcgggagccgggtgtaaatgtccttccagggcgtccaaatcgacatgccgagcgcgaaggaccgggcgatcgaaaagatggtgttccagatgacgtaccaaaggaacgtgtcgaggaagaagagggcgaggtccatgacaaacatgatggcgagcgtgaaggcggcgtgattccggcagagggcgttgccaaagtacttgtcggagcagttgcggatgaccatgccggtcatcgcccggatcgggtcgcggaacgagagcgtgaggaaaaagtacgactcggcaaacttgcagccaaagacgaggacccagaggaggatcgaggccgcgcggggcgccttggagagggccgggtacgaggcggtaaacgtctgggaggcgaggtacttgcgcgatttgctggcgacccggtcgccaaacatccggcccgagggcaggatgccaaagaggacggttgcgacgaccgagatgaagaactggacgatgccgatgatgagggcgacctgcgaggtactgtcaaagccggcgatgtaaatggtcgggccggcggtgaggccgaggacgatgaggaggaaaaaaagccggcgcgtgaggtgcgacgtgttgttccacgtggtcgggatgtagtagaattcgcagacggtcgcgccggcctcgatgagggtcgcgacggcgccgccgagggcggtgacggaccacgtcatggcccggtgggggacgaccgagccggcgggcgagtagatcgtcggcgagttgtaggccgtgtagaaccagaacatggaaatgtggcagacccagatccggttgaagttgacgagcaggtggaggaacgaccgcttctcgatgtacgtcttgaagaaggcccgcgaccagtcaatcttgtcaaacttcatgaaccgctgggccggcgggacgtcgacgaggcgggtctgcgacgaggtgaaaaaatatggaggcgtcagcaagaaggaagagcgcggctcgacgaccgggggggggggtcgacgcccgccaacggaccttgtcggcgaggacaatccgggcgatgccctccgggtaccaaaacagctggttgacgtcgtcgtagccaatgaccgactcgtggtccttctcgcgcttgagaaacttgccctcgaccacctcgtaggcctggtcgcggatgaagcggtagagcggcttgacgacggcacggaggtagaggccctcgggcaccggctcgacccggttctggcactcgggcgaccggtagtagtcgtcggcgcacttgaagatgaagcagaggcactcgggcacgaaccggacctgggcggcctcgccccagcagaggaggaagagggcgacctgccggagccggtcgtactggctcatgccgttcatcgcgttccgccagcggccgagggccgaatcaagcgacttctcggccgccgtcgtcggcccgccagcaccgcccttcttcttcttgccgccagacgcgagcgagcgtgcgcgggcgaggccagagttctgcgccgagccaatcgcgtcgtcgaggtcgagctgggcagcaaaataccactttcggtagttggcgtgctggccgccaatgtagtcggcgtggagcgtcaggagcgcctggttgggcgtcatgcgcgaggccctcgagtcgagctgaatcatcaggaagtcgaaaatgttgcggcacgagtctggtaaggcgcgggcgaggaggggtcagggtcagcctcctttccccatcgcgtgcgagcgttgttttcctcaagcggagggaacgcacccttctggaagccaaacttgtttgcgaggtcgatcaagacgtcctcaatctcctccttcgagagcgggatcgcggcgtcggtcgtccaggccggctggcaggggtcgatcggagaggccgaaaggaggggggggggcgcgcgggaagtcagctaggctggccgcgcgcgcgtgcgagctggagcgacagtcggccctctctctctcccttgaggagagagggcgctcgccaaaagcaaaagagggggacgcacgtaaggctcgctcggccggaaaccaccccctccaccgttgccgccgccgccgtttccgccgtgctgagaatcggtgaacgtcggcgtgctagcgcgcgacggcatgccaccaccgcccggcccgccaaacgccgccgcgcccccgccaccaacgggaggctggtcgtacgcctgctggccctgcggttgttgctggtagtagtgatcactcgacgccgtcgagccagggccgtactggccctgctggagaggcgagcctgcccggttggcagcgtccgagggcgggccggcgccgtaagggttcgaagggtcggcgtacgtctggtaggccgtgttcgggggcgggacgaacgacatggtcgtcgaggaaggaggaggaggagagggaggggaggctctcgccgaagcggcgatcggagggaggggagagtgtgtgtggctggagaaagggaggagaggtggaagacgggtcagtcgagtgggctggctcggcatcggacgcgcaccggcgggcgacagcacaaaaggactgacgctctctctctctctctctctctctgcagccaatctagtgtgcgaagaggtaaaagggaagtcggcctagtcttgccgatgggtgtcttgctgtcttggtcgatggaaggaaggagggtcgtagggaggaggatgttgtcgactctctcgccccgtcgcgcccttccttgcgcgccccgcgacgcaaaagaaacccagcctgccgcgcagcagccacctaagggagggggtcgtcacccgcgcagctgttctctcccctgacccgcgaacccgtcaatcggcgctcgagagctcgagcaagccgaggtaatgaggggcgagcaaaggcggctcctgtttttgacagacagcgaccttccacagctcaacgcactgccggccctcgtgctgcccatcatacccgcccgccgcgctctttgtcacgccctcacccgcgccggcttggcacaccccggccgatcgtttgatgcgtcttcacgctccgttcgcctgtaacgtccgccgccgacccagcgcaacccgctctgaacggcagacccgcgcgcttcagccatcgtcgtcgcgctcgatcttcgtctagtcaagattaagacgggccattttagagagagatgggaaaagcgcagagaaaagaagcgagagggaaggagggaaggcgagcgagcgggttcgaatcgggcagttcgaggtaggggaagagcgggccggaacgggaagagggagagagaaggagggagactagagggagggtccgtaaagggaatggtgaaggaggggagggagcaaggagcgtggaagaggcgacaacagaaatcacaaaagacagcaagaagggggggggggagggggatgattccctcatggcttgggtttgccaccttgaggccctccctcctcgcaccctgcccgtgcccctcgtgcaaactcccactgtcgttcccccccggttggccatagtaaccgcccgcggcgccggcggccgcaccatgcgggttatacgggtcgagatgggcgccgtccgagtaagcctcggccgacgaggatgggtgcgagtagtaggacggctcggcagagtgcggggctgtgttggcagaatagtcgtacgaggggtcgtaggcggtcgactggccgtagggctgctgcttagttccggagcagacaaagaaagtcagcgcagcgcgtagcgagggaagagggggaaggaaggcagacgcacgtcagagtatggctcgtactggccctcgtggtacggctgctgctgctgctgctggtcgtcgtaagccccatacggctcggcgccataaccccccgccgctccatagcccgccgccgccccgcccgcagcacccgccgccgccgccgcaccatagccataaccgcctgatccgccggcgcccgagctggcttcggcaggggcgtaagccgacgcgtacgagtttccgtactgggccatctgctgaggtcctcctcctcctccgccaacaggagcaccgtaccctcccggcccaccaccgccgacgaggtcgtcgtcctcctcaaagggcgtccgagacgcagctgccgccgcggccgccgcggccgagacgtccctatcgagtctctggcgcctgcgccttctcagcacaaagaagcccgcagcgaggagcatcgccgcgcccgcgatgccaacgacgacgaagacgccgacgaccgcgcccgtgttggcaaagaagccggacgtcccgcccgagccggccgcgccgtccgcgagcgagccgttaggcccgttgcgaacgtactgggtgagcgtgtagacgccgccgttggcgtcggtcgaggtcgcgagcgaggtgatgacggccggggcagaggtgacggtccggccggaactgtcggtcgtcgtaatgaagatcgaggacgaggcgttgacggtcgacggcgtcggctgggcagaggtaatggtgatcgtcgaccgcggccggacctggcagcgtattcaagaaaggaggggcaagtcagcgcatgatgccacaaagggagcaggagaggggcaacgcacgatcgacgagccgttcgcatcagtcgtcgtcacttcggggatgatcgagctaatcgtcgtcctcgactgctgctgctgcccgctcgtcgtcggcgccgtcgcatcgctgctctcggccgcggcagcgctcgacggttggacgaccgaggtgattgaggtgacgaacgtgctctgctggcgcgaggttgtcgacggctgcggggcggccgttgagctgtcctgctgaggctgctgcgacgtgcttggctgaggggcggccgacgacggaggctggacgacgactgacgacgtgatggtcactgtcggcggcgcctgggacgttgttggcggcggcgcggcagacgtcgtcacgggcggagcggcagacgtctcaggcgcggcggacgttggcgtgttaggcgcgctcgtcgctggaggggcggcggaggatgcgtcggctggaggggatcgaggatggggaaggttggaaggcgaggaggaggcgaggcgaaagggcgcgcgacgcggggcgagcgaacaagggtggagaggaacacggtcgtcagctgctggtcgcatccacttgcggtcggtccagcctgttggacaagtctcccagccgcgacgagctcgagcagtcggccgatgagccggcctgcaggggatgacgctcaggaaaggcaggccagtcctgcccagtcggtcacccctctttgccggccccaacccgagctccacgcgcaaccgagggcgagctcctcacccgtacccgccagctccgaggagcgagacggcatgcccgacgcgccagagccgacgacagcagcccataccaggcagaaccgaaagaagagaagcgactcacccatcgttcaagggcgaggcggggcgaaggaggagcgagtgttgtttgacgcgcgcgcgggcgaaggaaaggaaggccgggcggagggcgagcagttgcgcggcggcgacggcagcgacggcgaccagggagtttccgggtacgcggcgggtcaggcagaagggcgcaagaaaacagaagagagagagagagagggagagagagcgtcgttgggagggaggggtgaaagggtgtcaggtcgtcggcggaacggtctgtctcctctcgtgcgcgctcgctcgctttgccttcagcacctgcactttcgcccaaagccgcaaccggccggtgcgcctcaaaccagatccggtccaacggcaccgactcgagggcccaccggccttgcgtccccatctttcgcagcaagcagtgaaaaaagcacacgcacgaggaggagcagccgacgttgtcacttcaggcgcggcgctcgtcgggtcgggcgaggcgctcgtcggcggcggcggcgcggccgacgtcgtcacggccgggggtgcctcggaggtcggcgcagtaccgctctcgacggccgacatcgacaggttgtggttttagacgggaggagggtttgaggtcgtaggatgtgagctgacgagctcgaggagtgccggtagcgaagagatctggtaggtgcaagtggaggaggaggcctgatggtcggaggggcaagccaagaggaggaggatcagcgttacgccccgagcagccaagctgagacggttctttctcgcccgccctcttgcagtcgcccctgcgtgccaagggccgacaagagcaacgccacagaccagtctactcacgagtacgaagggctctcgagaagtcgagtctcgagggcagatggtcgtcgtttcgctcgagccggcggccgtgctcgcgttcgctcatttatgacgaggggcgcagcagcccagcgacctgcgccccgggactcgagcgcgcgcactcccccccctaagctagccgatcaccctctgatcggatgaccgccagttttcttgatccggggtcgcatcgtcgagagctatcaagcggtgccggtctcactgctgtcggacaacttcttgctcaaccatcctgcgggcccgcccccgcaggcgtcacccacccttccccggtcgtttccacccgaaccgcctgattggctcatcggtcaggtggcgaattcagaactgggcgccgtcgtctgcttccaatgggcaaggttcgggctcggtccgacaaaatcccgctcacactttggaaacccccgactgggacctctttacctggatagtcgtcgtcaaggaccccttcctccttcagccaatcactcaacccccttcgtccgcctaatcgtcctgccccgaaaacagagcatggcagaaagcgcccgtcgactaggccgtcatggcgacgccgcgcttgacaaagccctcgacgtcctcctcctcgtccttgtcgagcggcagcgcgcactcaaacagcacctcagccctgtcctcgtccaggtagaccgggagcgtggccgtccgccgctgccgaccgccgtcggtcgtcgctggcgtggtgccggttagggcgagggggacccagcggagtgggaggggtgggagggccgtggtcgactcggccagggtgagaccggccggggtgagcgtcgcgttcgacaggtggatgcctgcgagacaagtcgatcgagcagcatgtcagaaaaaggtcgagcagcaggacgagagcggcaacgcacccgtgacggtaaacgcgagccgaccagtgctcgcgccctcctcgggcgcaagccctagctcgagccgaaatcgctcgagcgattggccctcccgcctcgccgctgcctgctgggtcgcgctcaaccagccccgtgggctgaagagcagaccgagctggacggccggcgagccttcgacgctagatggagacttcgcgacgccctcgagctgggcgagccggagggcgagggacgaaacgagggcaaggggtgaggcgtgtgccgagggtagcttgaaggccgaccaggaatggggaacgatgcctggtggaggaggagcgagcgtgccgcaaggagtcagcctgataccgtgcaagatgtcgccagggcttcgggcgcacccttcgagagcgcagagatgagcgtccggaggtcgttcgtctgcttgaccgttccctcgacgacgccccggagggcagcgaggtcggccctgaccgtccgaaggagccgggcggccgtctcgtgctcgcggaggaagaagcggaagagcgggtcggccgcttcgccggtcggcttggagaccgtctgtgaggggccggaagtggagggacgttaggcttgacagactccatcagaaccctccccggagggacgcaccttgggcaggagctcgctcgcctgctcaacgaagcgcaggaggctcgtcatccatgccggccgggtcgaagccgaggcgtcagaaggcacgagctcggcgtcttcgagcgagaccatcttgcgcaggttgcggaggagcttgcggcctgcgaggaggagggggcatcagtggctcgcttgctgaatttgacctaaaaaaaaacggccaggacggaccgttggcggacgctatggcctttgcgctcgactctgcgaggttgagccagctcgtcgggttgcggtccggcagcgtgctcgcccaagcaagatactggccgacctgcgtgccctcgggcgagggcagagccgcgccgagcgtcgaggccggcacgagcggtgcgccgtcaaatgcagccggctggaagatcgagtcgacgaacgacctgaggacgtgggcgtcgaactggagtgtacaggcaagaagatatgtcagcggcagcctcgcagtcaaatggaagatgggacgcacttcgctctccccaatcttgccgccgtagattggcgtcgtgatgagcgagcgcagtgccgtccacggtagcgcagccgggtcgacgttagtccggccggcgaatggttcgagcgagaggtcgatcgcccggaaggctgcaaagagctcggcgtcgttgatttcgtatgcctaggggtcgttaaaggacagagggtcagcctagcggcctcgcaatcgccctcgctcaaagcgcaccttggtccagccgatgggcgcgtaggtgagacgctcctgaatgacggcatggaggaagcacgcgagcaagtagactggcagcgggaagtgggtcagcgacgggtcagcagccgcggcgcgaggacgatggagacgcacgacgctgcttctcggctggacccgacgagagctgcttggaagtgaggcttcggagaccgagcaggagtgttgccttgagcccgcggggcggctcgttcataaggacgcgcgacgtccgcaggatcgaggtcggaatctgcgcgcggccatcagagtcagcccggggcctgaaggcgtcgcatgggagtccagtgagagcctgcgcaccttgtcgctcgtctccatcgtcaggaagagccggaagcgcggatgcgggcgtagcgtctgcagccgcttctcaagggtggacgacagccagcccgacacgaggtggacattcttgagcaggaccgtcttgcccgcccgggcagcctcagcgatcgcctgctcggcgagccggagaccctcggcgctgcccatcgcgacgggcagaagctcgtccgagccagcaaggagagcctcgacgcgaaatgcggcgtcgtggccggggatgcttgcgagggcgatcggcgtcgtcggctgcgactcgcccatgaccgtctgaagatcctcctctgcctctagctggacgccaaagacgtcggccacaaaggcgctcgccgcagcctcgagccgatctggccggatggcgcggaccaggaggagcgagtggcaggcccgggccagtgctgggaaagattgacggctgttagcacgggcaaaaagggggttcgaaagcgcagacgcaccatcctcggaggcccagagatcggccggcagccgcatctcgggctcggcggcgtgaagaatggccgcccagtcgtccgagtgtgcagccatgtgcgcctccacggcgttgaatgtcgacgactggccaaagaggcgcagctgctcggcggcctgtccgtccaggagaggatgctgaaggacgttcgacgtattgagtgccgctgtcgtcgacgccgtgtcgagcaggaggtcgagctcatcggctaggccgtcgtgtgtgccacgtagtgcaagctgagcaagcaggagcgcgagcacgagccggtcgccgacgagcagggccgacgccgtccggcggtagacggcgacaaagaggtcgcggcagaggacgacaagtcgggcggccgggtcggtgagaccggcgaggttgccgttccggagcagaacgccctcaaagatctcgaggaagcccgcgagcgagaaggcgtagaagcggttgacctggccgagctggtcgagcacaaagaagacttggctgcacgcccgggcgagcggcaggtactcggctgtcaccgcatcgacctcggtcatgacagcatccgtctgggccgccttggccgcgacctcgcccgcctcgcgcttgagggtctcgagcgtgtcgatgacgccgtcattgtcgagaatgttgccctccgagtcgttgagcgcctggaggagcgagcgctcgagctgccggagccggagcgcaaactcaccctgaagccggacgaggtcgcgccgcttcctctcggtctcaggccgctcgacgcggagcaccttgtcgagcgcctggctctggaggctcgcccgcgtcatcgtgaagttgacaaacgtgacgcgagagcagatgtcgggcgcaaactcgacggccgggttccgcgtcgtcaggaacatggtaaaggccggcgaaaagtcgatgtcttggttgccgagccggatcaggacccggccgccggtccgccggatctctcggttaaggacagcgttgaggatcgggtcgaggtgctcgacgtcctggatcaggatcggcgtgccaaagcggagggccgactcgaggtgcttgaggaaggcttcgtcgaggaagctcgtcaccgtcatccgccggtcgcggtactcgttcaggaggaacgtcgtcgcctggccggttggatcaatgacaagcggatacctgttgaagcgtcggagcatgatggcgttctcgaacgagagcgtgtcagctgggagcgccttggcctgccagccgagccggtcgtcggccgtcgagaggaactcggggaaagcgagctcgggcttggcccggatgccggccgcctcgaggtggtcggcccattcgtgccagagaacctcgcggaaggcctggtcaaagaagccgccgtaggcgaggaaggcggccgagagcaggacgtcgccgacgatggtgcccatctcagcctcaaacgtcttgctgccggcctgccagcgctcctgctcggccgataggctaccgaggagcgtgacgctccggtcgacgcggagggcgacgcgctccatctcgcccttgatcgcctgcgtctcgctgatgagccgggcatagtcgtccttgtagccatcaatgctccgctcgaggccgtcgatgagctccatgatggacgccgcctggtgcttggtctgggcctgctcatgctcgagcgaggcgacctcggcccggagcggctcggtgtgctcgaggatcgaggcatagcggacctgggcaatgacccacttgacgagcgggccgcacgccttgctcgcccggtcgacattctcaaacgtgtaggtcggtcggctgaggtactcgcgctccattcgctcgcgcagcggcttcgtcagctgggccgtcctaaactgcgtgatcgatgcgatgaagtcgtcgcgccggaggatactctggaccgtcttccagccgtcgagcttgtggccgaggacggtgcagaccgactccatcgcaaccttgacggcctcgggcgggttggccatcgaccggacctcggtcagatgctgtttgcggatgttgcgaacggcggccgaggcctcgtcgagcgccggctcggcctcggcgagctcgccgtggacgatgctcttgcgctcctcgatctcggccgcttgcatcgcgagcgaggcctggatctcgaccgaggccgtcttcttctgctcggcctcctgctggtcttggaccatctgccggagcttggcgttggcctcggcgtcctttgcctcgagctggacccgctttgacgcgaggctgtggcggagctcctcgacctggctgaccgtctcgagcagcttgtcgaggccgacattcaggtgtcgttgctgctcctcgagctcgtcgcgcttctcgccaaagagccggacaaagtggttgatgctgattgagagggcagaagaagatcggtcagcggtgaagcctggaacgtcgaaacgcaggtcgcgacgtacaagtcgatgtagtgccggggcgtgacgtggttgtagcggccactctggcgcgtgagccgggcgttgacgcggtagagcgactgatggacgaagacaaacgcgttcatgacggcgagccggtgcgagggcggtacggccagctggcggtaggcgaccgggaatgccgccggcggctcgtagccggcatggtcgagatcgagggcggccgtaaactcgagggcgacctggaaaaaggcctggtcggaccagtcgccaaaccagtcgaggacgcagcggttgaagagcgcgggcgaggtcgcggcccgcgtcgcgagcccttgctcgggcggattcatcgtaaagacgacgtggaggttgcgggcgacctggccggtgaaccagcggtagagttcctcaggcgagtcgagcagaagtccatcgcgctgcgagccctccttgcaggctgtcatcagcgcggcatgctcgtcgccctcaaagaggcccgggacctcggcgttggcgaggagcgtgttcatccgctcgaggaagccggcgtcgaggacgttggactcgtccatgatgaagcagatcttctcgcccttgcagccggcccggcggaggaccgcccggaggtcgtcgtcaaagtcggcggccgtgtagcggttcgagaccttgatctggaagatcgagaggccattcatccacgcgacaaagcgcgagagggtcgtctgccgggatgggggttgatggtcagcaaagggctcgcctcggtcacaggtcggtgacttgacggaccttgccgctgccgctgacgccgatgagcagcatgtggccctgcgtctggcggaagacgcggtcgatccggaggacgtggtcgaggacgtcgttgaagaggacgagctggacgtcgagctcctcctcgtgaaagttgcggagccgggcctttgtgtactcgcgcagggcctcccgttcgaccggcaggtagtgcttggtcgtccactgcgaaaagagtatcggccgggcgagcgcctcggcgtgatcaatcgtcggaaagtgctcgcgcgcggtcgcgtcgacgagtgcgtcggtccagacgcgctccgactcggcgacgagccggtcggaaaagagccggagcgcctcgtgcgcccagacgcggacgagaccctcgaccgagagcgtctcgagcggccggagggcctcgtagattccgcgcgtccagcgcgtcagctcgcgcggactgtagacgtagtgtgcttgggtgtcggccgtaaagtgctgctggcaggcccggtagacggcgaccatggccgtcgtcagcggctcggcgaacgcgcgcagattcggcacaaccttgagcagggcccggttgaaggtgccgtagatctggccgagcgagacctcgcccgggtagtcgaccatgacgagcggcgcgtgtcggaggaagcggtgactgagcgggactcggccagggtccgtcggcgggttgcacgccccgacaaactggatgcgctcgagcttgacccaggccatatcggttgtccgccagaagccaccgcgctcgacgagctggcggataaatgagatgacgcgttgggtgccgtacttgtcgagtgccggcaagttgatctcgtcgcagaagaggacgagccagcgaccaatcgcgaccggggcgagcgtcgtgccggccggcgtcttgcggtactcgcagtactgctcaaacgtcttgaggatgagctcgggcgtcgtcgcgctcgaaaagttgaggccgacaacctcgagctggggcagcttgcggagcgcgctaaagagcgtcatcgtcttgcccgagcccggcgggccgcagagcatcagcggcttatgctcagccagccacgagtagaggacgtcttcgtgccggaccgtgtcgaccgtcgggatgacgacgtcggatgctgtgacagcgtgggtgtcaatctcaatcgtcggcaccttgccctgccagggcgcccagtcgccgctggcgacggcgacgtcgtagtcgatgacggtcccgcccgcaggcaggtcgaccgccgtcttggcccgaaggtggtcgccgagggcagcccgaagctcgagccgggcgtcgccggcaaaggcccagacgagggagacgagcatccgcttgatgacgtagcgctcgacccggtcggcgccaagcgggaagtcggcgtgctgggcatcatagtcgagcacggtccggaccgtcttgttgagaagcgagaagagcgtgctcagcgcccggacggcggtgaagtccatgatgtgctcgatcgagccggcataatcgagcgcagcattggccaggccgtcgggcgcaaagaacggctcgagaaagtcagcgatcgaccgctgagtggcgaggttcgcgctgccaccaccgctgccgccgccgccaaacgtgtcgtcctcgtcggcatcaaacggcgttgcccggagaccgtcaaggtagtgccggtagagcatgtcgggcgaaacgacgtcatcgctgaaccagatcatgccgcaccgactgacggtcgctagcgtcgcatagcgcaggtgctcgacctcgaacatgatgcggacgttgggcggcagactgagccgctcgccgttcggcagagtgagaagcttgttgtcgtcgaggacactatcaggcaagaggttcagtcagatgcttcgatcaaagtgcgcgacggagaccggaagagcgaggtcgcacctgttgaggttctcgacccactcggggtcgacgtcaccgtcaaatacgatccagtgtcgcttgtggctctcgccgcggacgtcgtcgacaatcttgcgaaggatgtgggtaaaaaggccgtcgttccactcgcgcgtcgtcgggtcgagcgtgccgtacagggcgtccttgtggattgctttggggtcgatgacgtacgagacgccctcgacgccgtcgagctggtcgagcgcggcgagcagcacctgccacgcttgcgtcttgcccgttccggacgggccgaccatcatcaggccgtgctggatctgctggatctgatacagctggaggacctttgcaacccaggcctcgccgacgacaagccggcgggcggcgcacaccttggcaatctcggcccgaagcgccgtgaggtcgacggggacgtaggcgacgttggggaagacgtccgagaggaggctggcgaggcggtggcgcagccacgacggtcagcagtgggaactggagagagaaggagccacgtgacgcacctcatgagcagtgggacgtcctcggccacgagcttcggcacgatcgtctcgacgaccgactgaatcaggatctgctgctcggcaactgcgtccgacgcatctgccgcagagctgacggcatcatccgaggcagcggccttgaggagtcggtcgcgcttgagatggccggcactgacaaggaccgccttgagggcccgcaggccaaagtcgtagtgcggctgcgttgagagctgctctgcgcagaggccaaagaaaggcacgaccttggacgcgagcagttcggccgcgcggaagccttgcgagaagagcatcacctgggcgatgagctggagatcgggcttggtcattgccatgctctgcgaggagggcgagggcgtcagtggcaagccaaaactctccggccgcagcggaacgcactcggaagagctctaagaggaaagaaaacggctcgttagcgtaaagcaggggcagttcgaagaggtgcaggccaggacgcactcttcaggttgtcgggcaggttggaccggccggcgtagcccgggttcatcgtgatgaagaggcctgacagacgcaagcgatcagtctcttggcgcgtctcaagtccagcacaatcacaactgaccagtgttggcattgacgcggagctgcttgccgacgagctcaatctcggcctcggggttgtggacgacggccgagagaccctgctgaatcgtctggacctgctgcgagacggccgacaggatgcgctcctcgagccggttgaactcgtcaaagcagccccaggcgccgacctggcagaggccgataaagatgcgacccatcgcctggaagtcaaacgactcgtcgcagcaaaagacgaggacaaagcggccaagctgggcgccgagcgctttgaccgactcggtcttgcctgtaagcggtgtgcgagtcggtcagtcaaacggcagggatggccgacgtgggcgtggaaaaagggactcgcctgttccggctgggccaaagggtgagccgccgagctggttgctaagcgcctgggtcagcgtcaggtagcaccggtccgtgagcggcgtctggacgagccggtccgggacgccgaggtactcgaagccgtaggtaaacgaggcgtcggccatgcggacctcgagccggtcgagagggtcggccttggcccggtcaaagtcgaagcgcatgtggtagagccactcaaagcttgtgggtgagacgacgccggcagctatgagcgaccggacgacatcccgttcgtggacgagttcagtgatgagatgctcagccttgcggcgaagcgtcggcgtcaggtcctcgagcacggcgtcggcgagcaggtcgaggcaacgcccgacggtcgcgagcgccggttcgagcgacgctgcgcaggcaagcgcgtcctcgacgagcgccgtccacgcgcactggacagcgagcacgacgagctggcacgggaaccggtcaacccaggcgaggaaagtagccgagtcggcgagtcctgtcgccagcaacgcttcgagcccggcgacggcctcgccgaggaggacggcgagcgtcagccgggcctcgctctcgatccgggcgagccagtcgttgatgcgcggtgtatcggcgaggacgatgggccgaccaaaaaggatctcttcgccctcgcgcgaggcgacgccctcgatttggccgccgtcggcgtcgagcacgagcgccgagacgccggcaaacatcttcttcaggtgcttcatgacgcggccgacgtccttgctgttgccaataatctcgagcaggtcctcgtcgccgacaaagtagaagcgcgggaacgaggcccgctcgcgctcgaggtactcaccgagcgccttctgaatcttggcgagcaggtcggccagccgctcgaggctcttttgtgcgccggggatcgcgagcacgtcgaggacaaacggcgacttgtagacgcgcttcatgacggcgagaaactcggtgttgatgttggcgaaccgagcgctctcgaccgggagcaggtgcttgatgtcggccgagccggcaaagatgccctcgaggtagacccattggcgctggacgtcgatccagacgtcgaagaggacgtggacgcggttgagcttggcctcccagccggcggcctcctcctcaaactccttgtagtagggcgagagccgcatcgccgcaagggccgcaacatgctcgccgcagcgcgcaaagagctcgtcccagcccttgatcaggcggcactttgtctggtactggacgagctcgagcgcgtagctcgtccacgtttcgcgaacctgcttgaggtactcttcgagcgccatctcgcccgccgcctgggcgaggacgttgcggataaggctctcgttgcgccggaggtcgaggtcgtagacctggccgagcgtcaggctcgagaagccctggctgctccgcagaattttgaacagctgcctccagtgccgctcgcggagcgcgtccgacttgagctcgccgacgaggacgttggtcttgagaaggccgcggaccgtctcttggacgtgctcaaaggcgctgtactgccgcatgcggctcggcatctcctttgtcgaggcgagcagaccatcgagttgctgacgcaacttgcggggctgtcgaaggcgagacgacggtttgtcagcgtcctggtctagtcgacgtggtcaggacggcgaggctgcacgcacctgaacactggaccagctcatctcacggatctcggcaatctgcgcccagacgcccgagagtgcggtccagacggccttgaggtcggcgagctcctcgacgatgggtgcaagcttgtcgtgcttagtggactcgaggtcgagcgcctgcaaggaaagcggtcggtcagtcgatgcctttctaaggcccgccgtgcgcagcagacgcacctccttggctcggcagacgagagcaaagccctcgcggagcttattgagccggccctcgtagacgttgagggtcgcgatcgcgtgctcggccttaacgctgccctggatcggcttgtcgcggtcccagtcggcgaggacttcgtcgatccggccgtcaagcaggcggtcctcggcgacaatcttcatctggaggccgccgagctgctgctggatcgagtcgttcttccgcttcagaatctcgttgaacgcgctccactcgccctggacctggtcaatgtagagccagtcggtcgggaactggtaacgctggcgctcgagcgtctgctggccaaccacaaagtcgtcgatcgccggcgcccagcggccgacgagccgcttgaggtcctggacaaacgtgatgaagccgacggcctgagcggtcgagctgccctcgatcgactggcgctcgagatcgtgccgggccttgaggacggcggcgtgcgtctcgcgcatcgcagaggcaagcttagcgccgtagcgggcgaggatgtcgcgctgccagctgtcgtacttggcgttgaccttggactggacggtcgcatagtcgatgacgcagacgccaaacgagcgctcgctgtcggcattgtcaaaggttgaccgcgtctgcttgatctcggtcaggagttgggcccagagcccgagcgagtcgcccaaccggtgaaagacgctctcgggctcgaggtcccaaagcgactggaactggagccaccggccgacgtaggagccgacctcgtggaccttggcctcgatcagccggaagggctcctcgagcgtcgagtcggtgaattgggcgagctgcgggagcgaaaggtataggtcaggtcacgtcggcgagggcgtgagagtctggagaacttacaagcgacatgtacgttaactcgtgctcggacgcctgcttgaggtgcaagccaatctcgtaacgcgagctctggagccggctgaggccgcagacgacggctgaaagcaggggctgtgggtcagtagactgtgcgcaagctacggtcgacaagcgcgtccaacgcacagagccaagcctgaagctgctgcatccagctcgcccgcgcgtgttcgatcggagggtcaaggtagatgacctggttctgaatccggacctcgtgccggagcgggatgacctcgacgagaccgtcctcgcgctggtcgccggcaaagccgacccgtcggcgggccgcctcggcgctggtctcgtcgtcgtcgtcgtcggctctacgcgtgaacttggccgaccactcgcgaatgatgagcgcgatgcggttgagcaggaccttttcgactcgagcgtcgagctcgagaacccagccgtcgaggttggcgtaaccctcgaggttgaggcggtcgacctggcggtagggcgaaagggatgacaggtcagtcggagacaggcagagcctcgatcaattgagcggcgcacgcacgatcgcctggatctgagcgaggatggccgagaaggcggtcgagctgtaggagcaggtcgcgagctcggccacgagccggtcgacgacctgtgccgtgtcgatcgccgcgttggccttgtcctgaagcaacgtgactgcgctcgcaaactcgcggacgaacgcgagatgccggttctcgcggtcgtacaggttgacaaacatctcccagcggagcggcatccctaaagacgaggtaggaaggcgggggtcagcaagcgtctggacggcgagccacctatggcgcacgcgcacccttcgaaatcatctgctggacgtcgttgcggtagtcggccaggaggagcgtgacggccgggtgggcggcgacgaggtcgaccgtctggttgtaggtccggaccgtctccatcaggctgacggcgtgcgggtagactttgcgggcctccttggccatgctcgagacattgtgcgggacgtgaaagttgagccagacaaggttccgaacctccttgaagagcgtgatcacttgcgggtcaaaattgacggcgagcgcgtaagcgccggtcgaccggacgcggacgacgtcgagcagccggccggtgatcttcatgtcgcgccgctggatgtcagccagccaagcttcgtagagcggccgggtgtcgagcttgcgtttgaagctcgcgctctcgctttggagcttctggccctcggcgtagagcttccagcccttgccgagcacgtcctcgacgcgctgcatgtacatggccagctggcgctcaatctgccgagcccagatgacagccccggcgaccgggggcaggtcgcgcagctgcgccatatggaacgcgtccgagtgccggtagttgtcgataaacttctggtggagcgccttaatgtcgtctttgaccgactcgatcagctgcgtctggtactcttggatcgcgccccggatctgttcaggaggaggccggtcagcgtctgacccagcacggagccgaggcaacgtaccttctgccggacgagcaacgcgttgaacttgctgaagacgcggaacatctcgttggcgttccgggcggtgccgagccggtcgcggaggcgggcaatgatgtggttctcgacccgggcgacgcgctcctcgtacgcagcctcggcggtcacccaaagctcagtcccgccgaccgagacgtcgaggacgtcgacgcctcggacggcctcgtacgcgagccggacctcgtcctccatgtcgattgccgggatgcgctcggccatggtcgtcgccgtcgtggctgcctcgccgttggtcagggcgcgggccgccccggcaccggccaccttcatcagacccttagtagggcccgtcatgaccttgagctgctcgtgctgcttgcggaagcgccggaggtaggcgagccgctcctgaagcttggcgtgggcgggcgtgatcttgatctggatgaacttttcggcgcgctttcgggtaactggccgacggcaacaagaaggagtagcgaggtcaactgggaagcctttgagcgagcattgcagcaaggggggactcacggtcgcgggcgataccggtaaactccttcatgtggtcgtcccacgcggcaaagacgtcgccgagctcggccatgacgcgctcaaaggcatcccagctcataaacatcagcttgccggtcccgagcacgcggaggagcgcgtcgttgaagtcgcgcgagatggcagtgacgagcgggagcgcgcgccggattgggtacggcgacagcttgagcttggtcgagatgtgccggaagatggcgccgatcgaggaggcaatcttcggcaggtcagtcgccgctaggagatcgttgagcggaaagtccttcataagctgattgtagttgtggactggcgagggcaagaaggcgtcgaaggggtcagcgtgagcgccgcgctcgcgggcggcatcacgacgtaccgaccgacatggcctccttgaggcccgtgtcgctgacgaacgagacggtcgcgtggaaccgccgggcctccttgaggacgtcaagcgtcagagcgacgccatcgccccggagctggctctcgatcccttcgagtgcgcgctccatcgagagccagaagttgatctcctggctggccgtcccgctcgccgggtcgcgcgagagccgggtcgtcgactggatcgccttgatccaggtcgagaccgtctgctggaggctcgtcaggaaggctgggtcggcgacgagcgtctggggctcgaccgtcgagggcgagacgcgctcaccggcggcccgggcgcgctcgaccgcggcagcgatcgccgggtgaaaggcgagcgttgtgtcgggaatctcgacgttctgctggagatggaggagcgacagctcgagctcggcgaacttcttcttggtcatcgggatgcctgtacgaaagggagggtcagcatgccctccgtccaaaggcgagggaaggccagcgcgcacccatcttgccgtcctcgcccttgctgtccttgttctcggccccggcggccgtctgctggcggctctcgacaaaggcctcgaaccaagggccgacgccccagtggacgatctgatggagcgactcgtacggcgtctcctgctgctggagctgctggccatctgggccgtcggcaggcggcgcagtcgtcgaggcagccgagccggcagccgccgagcccgacgtcgccgacggaccaaagaggttgagcaggtggagctggccggcgagcggctggaggaggtcgagggtcgggctccgcttgatgagggcgagcgtcgcccggtgctcggccgagtaggacgcgacagaggacgagagctcgtagcgctcgcgccgctcgtcagccggctcgtcggcctcgccgtcgccgaccaacgaccggagctgcgagacgtagacggcgctgaggtttgagtctgcgagaaacttgccggccatcgtctcccaccggcctccggggacgaaggagcgctcaagggcgcccgacgacgcgccgaggaccggagggaggagctggaggaggtaggctcggaagggggcgaggtcgaccgcccgggccgctggagcctgggtcgtcgagtcgctggcaacgacgcccaggtcctcgccaggtggcaaatcgagagcgggctcgctcatgagacaggtaaagaggaggctcgggtcgagcggcgatgtcgtttgcaggtcgggcgagacgaagggacgaagttgacgcgccgccacgagaagacgggcgcgcccgcgcagcagaagcggcgatgctgcagtactcagcagtaggcagcggtcgtgcgctctgaacagcgctctgacaggaaggcctctctacctggcgaagtggaatcctatgtgatacatggctgagccgagaaaatatcgtctgctgcaaaccgcctctctcaccgggcctcgacgcctcgcgcagagtgcccctggacgacaatatgctcggtgcccctggaattcagccatgattcgggaccctgagagcgcaaataagcaggcgcagacagccgtcagtcgacgagctcaggtcgaggcaagtaaaggtcgacataccgtgcgattgacagcccggacgccaaagagccgccggtcaaaccacatcttgcacctgcaaaggcaaaagacaacaggtcagagtgctaagtccgagacgcgccaggctgcatcatcacgcacgtcgtgccctctgccggccggttcttcatccccttagccgcctcccggatcgcctcgctctcgtcctcgagcggccggacggccgtcccgtactcgggcacgaggaagaagatgcctgaccagcgcgcacacgcccgctgagcgccgggtggggggagcacgcggtggaggtttgaccggctgtcgagagccgtcgacgtcgactttttcagcgagggagtctctttgccaacggtcgcacaaggctggcttacaggatgccgcccgagaagattgagagcaggtcggcgagattgacgacgatgcagccctcgagcggctgggcgaggaagaaagtgccgtcagtcccttcggtcgcggcgagcatcaatcgcgaagcctgtcgacagaccttgacaaagagccactcgtccgagccaggcggcaggacctggaggccgccggtgagcgtgttgtcgagcagtgtctgcagcgagcgggcgagaggggcgcgcagtcgacgagacatagacacaagacgtcagcgtcgggaagttggtttgccttccatctcatcgctggcacctgccctcatccaagtgctagcatccaagtgctaggaggagaccgcttttctaagatcagcgagaagacgcacgatcgagccaaagtcggtgtggctgccgagggcgagccgagcgccgtcctcctggggcgggttgcgaatgacgcgagccttggtcgggcttcggttctcaccgccttgctcgtgcaggcgcttgagcgtgtcctttgggaggccgagcgcgcgctcaaatcgggcgaggagcgtgtagcagacggcggtcgcgtcgcgggtgaagcggccaagggcgtcggcggcctcgacgatcggccgtgggtaaccatggccgtggaggccggcctgctcgctcaagtcagcgaggatgtcgtcgacgccgatgttgaactgctcgttcgtgtcgaccgagccggcctcgtcgacattatccgtcccgatggccttgtagccgaaggacgagccgagccggccgacgtcaaacgccctcttgtcagcctcagcgaggccaaagacggctgcgcaggcgtccttgagcggctcatagtcgagcccggtgtctcggaggtagaagaagccgagctcggtcgcgctcgcgaggagggcggcgcaggcggcggcgtcgtcggcgacgacggcagggtagtcgacgacccggagcggcgccgtcttgacgtcggcggggaacgggatcgacggcaggcggtcggcgaggggcatgggcgggtctgtggttgggtgcaagtgtgggtcgagttcgggctgtagtcgagcaagcaggtgagaaagcaagagggagatgggagtcggggcgagagaagggcgacggttcccacatcgcaccctcgtcgatgaggcagaggcttcggagggcgagcccgcgtgagtcggagcggacgaggccgccctatcgtttgcatgcttgcccgactctactgcccgtcctcgctggcttgcggcgactgcttggtacgcgcgcggcgtagctatggccgctgcctagagctccatgctgccaagcttgcactcatccaagagaagggtcgatggcgtctcacgacgtcgatgcaagcaaggcctgctgcgcgggggccggggcgaccttccggcctggccctgccttcggctgcctgcctgcgagctggctgccaagccaaccagacgacgacctcgctcgcagccgggagacggccagcaggagggtgcgtatgtgctgccttcctcccttctccgccggccgtagcgacaatgactttgacggcggccgctgggctaatcgcgcacggtgtcgtcgttcgtcggggcgcgcgccgaagcgccgacgacgagggcgagatgggccagcccaaccgagcagcctcgagcctcgggcccgggtgctcgacaaggcggcaggacagctttgcgcctctctctccctcgtagaccacccgctcgagctcctgaaggcagtctgaaaaagggctctctggctaggccggcatggccgacggcagtgctgctgccctctctcggcgggcgggggggcggccgcaccacacgcgccgaaaggaccgacgagccattgtcgtcgagctcgctctcaaacagcggcacctcgtcgtagaacaggatcgggtccggcctcgcgagcagctcgagcggaatccgctcggccgctgaggccgggtcggccggcctccagcgcggcatctgcgaagaggaggaggaagagggaaacgagaggcggccggcgtggagcgtcgtgtaggtccagtcgaacggccgaacgggcttggtcgggagcgggccgctttcgggcatcagtggcgaggggccggtcgaccttttgccgttcggtcagccgtccgcccgagttgtcgagaacgtcagccccaacggccagtggtaacgctgcgagcagctgtacgggcctcaacaccgctcgactgaactgacctcgtcttcccccatgcctcggcatgcttcaccttgacgcccccgccctcgctatcccacccttcgccgtccttgacctcggcaagcgccgggagcgcctcgaacgcaagctcgaggccggaagcgtgccggaggcagaggccgttcgaggcaaaggtcatttcgggaagcggaagcgcgaggtgctgcgctgctctgcgaggggcggcagcgacggcagcggaggagggatggtgacgagagagggagagcggggcgtcagcgtcgagttggagccgatgtctgcctgccatgtctgcctggcttgcactagcagacgcaacgaggagacagcgagagcgaccgacggccgacggacgcacgcgtcaatctggccggcgctcatgatgtgcgtcgacctcgtccggatcgtccagtcgccgagctcgagcgtccgcgcgtcgcctggcaccgacggctcgcggacgctgtagggcggaatcggctcggtgtaggcggcgagggcggagaggggctgcatggcggctcgtcaggggagatagcggtcgggggctcggggctgagggcgctctctgcctccgaagcgggcacgctcgacgaggccggcggactgggacggcatgaccgtcatctttccctgtctttcgtccgcgagagagagagagagaaagagagagagaggaccgacgctcgctgacctgcgtgccgctctctcgtccaagggacgtgttcaaacgataatccttgacgaccctcgtgggaggagagaacgcctggcgcacggacccctctcgcgcctgcctgacccttcctgcctgccatccccgcttgagcgtctgacagcctagcacggcgcactctctctctccagcagcctgacccgctgccgtcgtcgtcttcgtcgtcgctgtcgaccgagaaaggacgcttacagccctctttcctctcgaggcacggccgtctctcgcgcgccgctcgtcaggcacggcccttcacgctcgagattgcctgtgcgcagcagccaccaggacgagcgcccgcctcgtcggccgtcttctcagcccggccttccttctcttgctctgtccgaacacccaccacctctctgccctcccggatgacaacctccctcccaccgccgcctcggccgtcctcttgggctggcctccctccgccaccgctacaccaccaccaccaccaccaccagcagcacacgtccatctttgacgcctcggacgaggccttcccggccgacgacgacgacgacggcgccgccagcaacggcttcttcagggcgccgtttgaccggacgcctcctgacggcgacggcggccatcccggctgctggccggccgaggttcgtcttcactcccccctcctcctcccgtaacgccgccgccgacgctgacctccaccgcccctccttcctccctcttcgtccgccggcctgctccgtcctcgcgcagatcgacaagacgccgacccgcccaatcggccatttcgcacccttcgccttcccgccgcccccaaagccaggcacgctcgagccgtacctcgccgctccgccccggctcgggccgttcacgtcgtctctctcgcttccgcagtcgtactaccaccagcaacagcagcagcaggcgcccttgttagcggccggccgctcgcccgctgccaactcgccgttcgcccttccgcccgcacaatcggcggccaacaccgcgcacacccacggcttccccttcccgcccgtcggtggtgtcggtggtgctcgaagcagcagtagcggcagatctctcggcccgtctgggccgctgccggcgccgcaggcgctctttgacggcgctggcagcggcagcggtggtggcatgagcggcagctttggacggctctcgctgcttgacggcggcggtagcggcctgtcgaacgggaccggcggcgcccagaacaacagcaacagcaacggaagcagccacaccagtagcttcggcaacaacagcagcagcaccagctcaggctcaggcggcatcgaatcccggctcggcttcgcgagcacggccccgagccctggcgccggcgccagcggccgagaggacggcccgactgcgcaggcggtagcgaacaaggacgccgcgctcgagctgctctcgcgcaagattgtcgaggtgcgccccaggggacctcccctttgcttgatcgtccatccgctgactcgggcttcccacttgcggtgcgcgcaccccgaccgagcagatggaggccaagctccactcacagtcgtccctgatgctccgcctccgggacgaaaacctctcgctcaaggccgatcgcctcgagcgcactcgctcctcacacaacgccaatgccgacggcagcctcaccaccaccggcgaggaggacggccaagggatgtgtgcgtttgcgtttgcggcggcagggcgcgagtgtcggacggagccggggacgccggttgatacggccgtcaagtgtgcgatgggcgtcctggccgacttcgacgtgcgtaccctctccctctttcctcttccgccggttctggtccttttacggcgggctggccacggaaactttggtgctgatcgggttttgctgttgctgcagtacgacgcgttcgcaggcggcgagcgccagccgcagccagaggtcgttgcccggatcctctcgcagagcttctcctactcgctcgtccgtgccccgcttcctctctgccgtgcctcctccaacaccctgtcgacaatccgaagctgatggagagcccactgccaccgccgctgctgctgccggcgcaggtcctgccgcacgactaccgggcgctgacgtggacgctcgccaaccggacgcagcgctcggcgcaagagggccacgcgctcaagtttgccgccaacttcctcatcgtccgtcccttccttcctccccccccccccgcttgctgggcacgcgccgagggctgacacacccctgctttgctgtgcttgcgcgcgtgtgtatgggcaacacggcagtcgaaggtccagcagctccggggccagccgatggagcacgtcgtgcacgacgcgatcctcgccgaggttgtcggtctgtcgcagacggcgttgcgtcccttctttctcctcttcctttcttcccggaagggctcgacgctgactagctctcgctccctgacgcgcttcctcgcccgcccgcgctgacaaaggaacggaaactatctcgtccagcagctgctcgagtgcgcgcccgtccgtgtccgggccgacgtctacggcgcgctccggcccgagctccttgcgctcgcgggcgacaagtacgggacgcacgtcgtctgcaagacggccgagtttgcagaaatcagggtgcgtctcatcggccgcttctcctctttcggggctggcgctcgtctcggctcggaaagctgacctatgcacgctcctcgctggcagccgcttctcgtccaggatctcgtcgcaatcggcgtcgccgagacgttccagacgggcgcgcgccggctctggaagtcggttgcgtcctccgtccctccttccttccccctttcatctccgtgcttagcgtctggccttccctcgtcttgcagatcttcgaccactgcaaaaaggccggcgagacggccatctttgagctcgtcctcaagcagatggcggggaagtgggccgactgcgcgacgacgactgagaacgggacaatctcggtccagcaggtgtttgagagctggccgtcgatggcgttcatggtgcgtctgcctgctgggtctcgcgacgcgcctggacgttttgtgcttgggcgctgacgccagggagcggggttcaatcaggagccggtcctggtcgagatcatccagaatattgcgcgcatcgccaacggcggctggggccagtgcgtctgacgtagtcggctctgccaagacgtcaatcttggccttgctgacgcacctctcgctccctatcgccgtcgctagcttcctcatctcgaagctcctgtcgaacccagccggcaacctccggccgacgatcctgatggccctgctcgagtcgccggcggccgtcgcgaccggccaccacggcatctcgttcctccggacggcgctgctcgagctcggccggccgggcgtcgagatgtatgtcgacacgctctgcagcgtccgacgcgagggccaggcgccgcagattgtcgaggtcgcgggcgccgtcgtcggcccgtcagttccctttctccctttcgccagcgcagcagcaacgaccgactgaacctcgcccgttctttttctcgcagcggccacatctcgttcctctggacgatgctctccgtcagcgacaagaaccggctcaaggacgcctgccggaaccacattgtctcaatccgatcttcacagagcggcaacgatctcctccgccagctcgggctcatgccgtcaaacacgatccccaagctccgctagaccaatctcatctggcaccaaccacactcgcagctcatttttctggtctcgctctagcttccgccatgcgctacctccacactctttgctcgcctccggtccggccgtcgctcggcggccccagtttcttctctctctctctctctcacacgatctcctctcctccttctttcccagctggcgcctctcctgacgcgcgcccgcatctccacctgacgacctctctcagcttctgctctctctttatcctctctcgcatcccggtcctatccgcctggtctttggctcccctcccacgcacgttatgtctggcacgcttcgtgtcaccccgtttcctcacgttccacctcactgtagcgccccaccctcactgtctgacgatcattaatcattcagccccctgctctgcgttcccggagcgtacgtcagccgctggcgctctgcagaggacgtcgtgagtcggccacagcagcgcaagccgaggagaggcgcgatctgaccggatgtcgtgttgcgccagctgctcacgctcacgtgctcgccgcctgcgtggtcagaatgccaggcctgatgctgcgcgggatagaggatgacgggagcggacggcttgcaagtgcaggagagcgagttgaagggtcgtgcagcgcatgagcgcgcgggtcatgaaatcgctcgcgtcgtcactctttgccccccgaccggcgtccttgctgctcctgtacgagccgattcgacacatttgtccggtggttgcggttgttgaggtggacggtgaagttgtcgaggagcgggcccggtcctggatcgtagatccggccaggacagtcgttctgcagtatccgacgggagcgagggtcagcttttgggcccaaacctgtcggagctagcagactggggacgtacgcatttgatgcgccactctggcgcgccgtctgccgaggcgcccggcggccgcttgaactttggaatgatctggaagcggtcgtcgcggtacttggcgcggagctcggcggcagcgttggtgatccagacgggcggtgactagggggagagggcggggcagcaggtcagcgatcgagagccactcagacggagacaggcaagcgagcgcaccggtgcatcgattccaggggcaggcgtcgccgacgcaaccgacagctcggacgagacagatgccggcatcggcggccggacgggctgggtcggctgcagcgtcttgacagctggaggaggagggctcggggcgcgaggcgacttgggaggcggatccgacattgggtcgtcgccgtccgagaggctcgagagcgagtcgggcgaggcaacgttgtggaacgacatcggcgagccctcggccgtccgcgaaggagtcggcccgccggtcgactccttcttgagaccgttggccaccgtctcgggcttgtcgggcgacaggcggacgctcttccgcgggctcggttctcgcgtcgagatctggggcgacttggacgggctccggtcgacgcggccatccatgccgtgctctgcatcctcctgcttgacgtcggttcgcatcggcgtgctcgctccacgggtcgaggcccggggcgtctcgttccgcgacgacaccttggacaccggcttcttgtggtgcgaccgcttcttgtgcgagcgggcaggcgtcggcggcggcgatgaccgggccggcgacggcgggatcggcgtcgggagctttggcacgggcgtctgcgtcttgaaggcctggtggcggtagggctccggctcgggagagagcgagcgcgacggcggcggcgtgcgctggctgtcctcggtcgcgtgctgggtgatgctggccgaggcggcaacggccgcagccctccgaagactcggcggcggcgcatccgcgagattcgactcgacgccgggcgcgtccggggcagggatcggcacgccattggcatcgacgccgccgaggcttggcaccgtccgcttgctcggtttcggctcgcggtcgggcagggcgacgccgcgccggcccttggtctgccgcttcttgcgcttgagttccttttcgcgctccttctcgcggcgctcgatcatcgcctcgtcaagcttctcaaacatgggcgtgaagctcgcgttggcgacgtcttcagtccggacgaccgagacaaccggcgggaggaaggcaacgcgcaggtcgtcgtcaaggacgggcgtcccgtcgaacggatggccgacgagaatgagcgagcgcaggtagatctgcgactgctcgcggatgtcgtgcgcgatggccgtcttgaactcgccggcgaggccgaggtcggccgcatagatatcggcaaactgctcggccgcggcgtccgtctcactaatgtcccactcaaaggcgtcggtcaggttgagcgtgccgacggtgatatcgagctggcgtcggagaggagcgcaggtcagcaagagcgcgaaagggatgtcattcgcgaggataggcggaccttgatgaggatgcgcatgtcgtcgacggccatcgtcttgctcgccgccgctgcccgcgagagttcgtcgagcgtcatcgccctctcgtcgccgcctccgaggtcaagggcgcggcctttgcccttccatcggctgcgtgcgcggtcgacagagtcgcgccatctgccccaccagggatcgtcgccctcctctgcgtccgcggcgccagtcttggcgccggtcctcggaagcgttgccgccgaggtgatggtctggtacgacgtgatctgctcctggatcgagctgacaatccgcgacagcagcatcggcggcaggtgaaaatcctcgacgaggttttgcgcaaagagctcgggcgtgacgaccggatccgcagcgttccaggtgaatgtgtcgcggaaccgaaaaggatcgctgtcgatctcaagccggatcggaatcagctgctcctcgaccttggcggcctgcttgagctgattccgggagctgtcgagtcgaggcgagacgtcggacaagccgtcagcgacaggagccgcctgcggcagatcagcagcagaggcaacgcacaacttgatctgcgtccggccgagcgtcttttcccactttgagcgcttgaccgagggccactcgaagccgagcgatcgctgctcctcgatcggctcgcgtcggcgcttggcctcgctcccgtcgacctcccaccagtgaggcttggcgagcccgcccggccgcgtgcggatgccgctgacgagcgcttgctgccgcttctggtccttctcagcgctctgaacgtaggtctcgtcccgtgccttccaaaggcggacgttggcgagcgcgtggttgttgagcgcagagacttcggcggaggttgtcggcgtcagcgtcgcagtcggggcgaccgacgtcgtcggggtcgagctgccggtcgcgagcggctcgggtagtgtggccgcgagagggagtactggcgtcggcgaagactcgatcttgatcggagcgggaggcgggtggggcgacgtgctcgtacccattcgattcggtggctgcatggacggcgagccagtctgcggccgaaggaactggggaacggcgggtcgcgcacggcgtcagcgtctgaccgagcccgtcgcagcttgtctatccggcagactcacgtccatcgtcaagctccctcgcgagccaggtcgaccgtccgcagtcgactgctgctgctgctgcaagctgaggctcatctgcgccgcctgctgccagccattggcctgcgcttgctcgctgctctcccttcgcggctgctgagccgattgcgggcgtgcttgcgcgccaggggtcgcttgtcggtttggcgagtcctgaccttggctcggagtgcttagctggggaagttgaggctgcgacggctgacgcggcgtctggaactgctgctgctgctgctgctgttgttgttgctgctgctgggcggccaagagctgctgttgctgctgctgagcccatgacggctgggcatgcggcgcctgcgatggcagctgattcggagccggtgacggcggcggggcggcaatcgaccctctgccgttgccgacggtgcccggcatgttcggcacgccttccgctcctcggccgagctcggccattttgctcgcgacatagttgagaaaggtcgggttcttctgcgagagaaattggagcgcggccgggtggtttgcccagggccggaactgggtcggcaggagctccggcgcgatgaagggcgccagcgtcgggtcgacatttggcaggccattcggcgcgaggaagggcatcggtttgcgcgccggcgtcccgctcggacccggcgtgggcgtctcggtcgactgctgctgctgctgctgctgctgggccatcatctgctgctgctgttgtggcggctgtgggctgagcgacggctgctgctgcagctgctggctctggtaattcgggagctgcgaggggttgaaggccgacggcgactgtgacatctggccttgagccttctgctgctgctgctggttgccgttggcatcgaattgctgctggaactgctggttgcgcgccttgagcgcagcctgtggtgaagtcgagcagccgccttaggtcagcctgaggctgcaagccagtagactgagagctacgagactgacggccatcatctgctgctgcctcgccagtgactcgggcgtcatcgacgacgcgccgtgctgctgctgctgctggctgttgaagtcgccgctgatcgaccgattgctcgcgctgctctgtgcacggtcaatgccgccagggctgccgcggccgagcaacgcgctcgggtccatgccgccgacgccgttcggctgcccgttgccgagcgcagtcatgcccgacagcatcgggttcggccgagcctgactgagcggcgaggcgaccgaagcgtgcgagagggcgggcgagcctgcttgtggcggataggccccgcctgcgttggacgaggaggatgcctggcgcgagcggccaaccgaagccgatgacggcggccgctggaccggctgaccctgctggttgaacgtgaaggcgggctggccagaggcattgccgaggccagtctgctgctgttgctgctgctgctgctgctgttggtactgctgcgtcgcctggagcagctgaagctgcgacaggctctgcggcgacgacgttcgcggcgacgactggttggcgaggctttggagaaggtgggctgggatgccagagaactgcgggaactgctgctgctgctgctgctgctgcgatggctgctgctgctgagcaaagtgcgagccgttgccctgctgctgctgctgctgctggtacatctgctgctgcagctgctggaattggagctgctgctgttgctggaactggtccattccgccctggccgagattgaactgctgctgctggttcggctgctgctgctgaggtgacggcgcgacgttcggccactgcgagttgccggcctggtgcgagtccatctttcctcgcgcgaacgagagggaggcggcggcggctggctagcgcgtcgggatgagtggccgactcctggggaaggaacaggcgagcgagcagatgtcagtcgcagatcgcgagatcgatggatgggcgaggccaaggacgcgtcgtcgcgacgcatgccggcagacgacgtccttcaagagggagggctgaggaccaagatgctggtgcgcgactcgtgcagggcccaccctccgaacgctggcagccagggccgggccgagcacgcggtggcgtaggccggaggggaaggcaatctcctggccgcctccgcgcgttccgaaggcgggcctcgggcgacgtgaaggcaactcacaggaagtttggtcgtgggccgggcggaggggagggagtcgagcgagcgcgcaagcgagcgagagaggaggcgcgcgcgcgcgcgcggaagggacttgggcgacggtcggtcgctcttactttcgcggcttcgacaacggttgctgaggccgctggttgggtccggcggcggggcggggctgagctttggggcccggaggcgattgactgctggcgaaaggggtcgttcccgtcggtctgagcttgcgatgtgggctgggcggccgtcgggtctccgcgggctcagagcgcagccagcaagccacgaaccaacgaatccggcggactctggcacaccgcccatgactactcgtcggcccgccgagccgggtcggatcacagagggagcactgatagcggctccgagagaagagagcagagggcggagggttggccgcgcttaatctctgtcgaggcgagggagaagccgtggcgcaggcccgaggtccgctcggagtcacgctgaccgtcgtcgtctgtcggccaacaggacgacgcgctgacctgcgctgcaacaggacgacgcgctgacctgcgctgacgactgaccgacaccgctgaccgccccagtgcagagcccgccgatgcgcgcaggcggtcataccatcagcacggccgaaaagacgcagaggacgaacgcgcccgagagagtgctgacggcgaggaccggcagtcgcgttgctgggaaggtgcccttgacgagcgcccgctggacggcaaagtaccggaggaggcctgcgaggtaccggggcaactgtcggtcagtcgaggcgggacgcagagggtcggcaaggtcggacacttgcctatgacaaggatgagtaagccggttctggagccgacaaaggttagggtcgaagctagcgagcgtcagcgtgcgtcacaggtaggtcggcctgatcgtcgtgtacgcacgcaatgaggccgccgccgagcggcttagcgaagctggcgagccggatcgctcgccgggcctggatcggatcggctttcccgacgcgttcaatgagagcgccgtacgaccgatgggcctcctctagaaggacgagcagctggcgcatgtctgcctcggctccgtcgagggcgagcggcgccgtcgacccatccgacagcaggaacgccaagtccgggccaggtggcggagggagcgacccgagtgagcgagagagcgagaagatctgtgtcagggctgggatcaggagcgcaaagaatggcatggtcagtgacggctgggttcgcgagtgatgacgcgtcggcgcgcgccgtcgagagccgctcgaagcacgtaccaacgccgactgagcagaaggcaagcgacgtccggagccaggccaggaaggtgcgctcgctcgcgagatgatcgcgcgcgacgctgccagtgttctcgaggtggagcggccggacggccttgaggagggagccgacggggctcgaggcgagagcccaccagctttgcggcgttgatggccgggagccagcgagagacgagccgtttccgtcagaaggttgctctgctcgcccgtctccagaggtcaggagaggcgtcgtttcgattgctgcgggcggtgagctagaggctggggcgtcgtgctgggatgtcatcgctgcttgctgctgctgcgctcgggtcgcgtgccgaaatccgtagctgtcgtcaagtgaggtctgttggaggcggacgagctggttgcgcacgggtcaggtcggaaggatgcagggacccgttccaggcgcgcgagctcacgattgcttggaagacgtaattatggatgtggccgtccggagggaaggagcgagcttgacgtagggcgctcgccttgcccgttaaggatgacaccatccgaccgtccgccggacatactgcagagacgatgccaaaaaatgggcgatgagccacggcagcagggtcagagctgagcctccgtgtctttcctttcgtctgctcgtatgagctttgaacgagccgaagaacgggttgggcgagggcgaggctggccgcgcacgagctggcggcccttgagctggcctagaaggcaaggccacgccaggacgtcccatcaggaggtcctacagcaagaactcattatatgcggacggatccgacactctgatcaactgaggccaagcactagtcgccttgcttccagctgctttggcgggccgggtgcgggtaaggcggccgggcttgaaaaaggggctgaccctcagtcttttgtgtgcgagactccagcgagtcgagctgccgacctgctcgccgaccacgaccccgcctgttctttcgacttcattttcatttctgagcttcagctccgctctcaatgactcgcagacgctgcagccttcgctcgccgcaaccgatctctcgccatctctttgcggagacgctcgctgcagagccgccctcgtcgccagctggcacgtcccgccatcagccttcgccggcaacgtcccctagtcgacctccaacgcacgctcttctgtcacaccaatcgccagcttagtccacaaggccccaagtgtctctaaatcgggccgaccggcgcttcgcttgaaggaaaggcgtctgagggagcacacccggtaagcacaagctcagtcttggactcgacgaggtgagcttcccggccgctgcacccgcctcgaccgtcactcgtgcccaagcctgaccacgactgtctcctcctctgtcctgtttccgtcgcagacgcttcgcttgcgaaccggcgttgtcagtcggtcgagctctcgttgctcgctacgaccggcggccgacgggtgcgtggcgcagctcgactgaccgctgctcagtcacgtcgcctcgacgccgagctgacgccatgtgcgctcccattcccttcaggcaagcatcgaactcgcagatctcatccttgcggcaaggtgatcggcgccgcacggcgttttggatcgccgaggtgagcctgctcggctccctgagccttgtcctgagccgcgcagcgactgctcactcagacctgacaatcggcctccgacgcctgtttccgccggttcaggatacagtctgtactacggcgcacgtacggatcgtctccaatacgggcggatccgacgtcgaatgcgactggcactgagaagcggcctcagcgacgcaagtccccactgccgcgctcgagcccaggtaaggcgaccctttcagtcccaccgccctccctcgccaagcaggctaccgcagacaatacctggtacccatctccagatgccgtcaacgcatactgcaggcttcaagtcgcccgaagcccgtccaatccaagtttggcctcggcgacaagtttctgatggacgccccaccggctgccacgccggctccgatcaaaccggtctcgcccgctccgaacgatccgcagaagtcgactgcaccggctcgaaaaagagcgaagactcgcacgaccgtggcgcccgacgccgccgatccgctctcgccgtcgctgccgaccgctgtgctgcctccgtcaacgtcttcgggcgcgaaaggaacgcctaccgcttcaccatcgccagagatcgcccgtccggtagtgccgagagccgagcctgcggctctcgagcaagcgtctcctcctgctggccgcctcgaaccgtccctttatccgtcgccacctccagtcgtgggcccttttagccagcccgcaactctaccgccactaccactgctagcgtcgtcgccggcatcacctacaccgcccgacaaattgttatctgccacgccctgcatgccctctttgctcccacgtccagcgccgcctgccaccgggttgcgtcaagcggcgactcgtccggttatcgacgaagggcggacttcccgttgatcgaaggcgacagtgcgtggtcgctgtgctgcaagacgcaagatgccttcagctgatcagatctgagtccttctacagggatacactgccaattcgagccttgcagccgcgcagacgttcttggagcgcctgcggtcatatcactggagtcgtatcagcgttaaagtcgcccgcgcgtccaaatctgcccgatcgtcaaacttgacggccgactttcactcaagttgccaaaacctctttgatcgcgcagaagatctacgcgaggccgatctgccctactggatcgaggacctcgaggacgctctcgccctcggccggcgcagtggcctcaccagctctgacgaggccttcctctcacacatccttccggcaatctcggcgctcgcccaccggcacctgaccgacctggagcgagcagatcagggcctttctttcgatcgcagcagacgccatcccgtggtaagacccgcgctttgcgtcgcccgaaacgatggaggcccggctacccgtcaacgacgcccggcaggtcacggagatccaacaagcggtcgccagtcacgtccggcacttcggtgtggagatgtcggacgcttgggagctcatgacgagcctcgcgatccagcagttcgcgtcggcggtcgaccgtcgggccatcggggctcttcctcaatcgctcgttcgggtgtcgcacgacgtgcagctgcgagaggcctactttgacatccgcacgacggacaacgccatcgactttgcgcggcgatggatcagtcccgacactcgcctttctaaggcctggttctggtctgagcttcttgaccacgctttgcgtgccgagcttcctccgacgccctcggtccagcatgtcgccgattacgtttgggcctgcgccagcttgatcgacgctgcagaagaacacctccgaacggccgatgactggtacctccaggcagtccggatccaggagctcctcgctcgcatcgacgcgctcgacaacggccggctcccgatcatcgacgcagagctgcaccagagcatgctcgccttcctcgtcaaacaggtcccgatcgtcttccgccagtcgtcgccagaaggccgacgagtctcgctcgattccagcctccggatggccgttcggcgtgccttgcgcttccacccgacacgacctcgcaaacaccttgacgccgctgctcatcatgctcgacaagtcgaagctcgaagaccgaacgctcggcctcgctggtatcctgaccgaggccttcacaatgggccagatcgaccaagactactttacgcggcacggcttcgaccactggttctcgctcgccttcccggccgagccggctatgacgctcaaggccatccgcagccggccgacgctcaagccgggctcctccgccacccttccggttaaggacgacctgcccaatatcgaccttgccttccgcaaggtcaacttcgccgagagcagcggggcaactcgtgccgacaaggaggccgccgtcattaaagcgctcagggacatctgcgacagcctcgtcaactatatctcgctcaacgaggtcgcagagcgcgaagcgatgcggcactttcgtccgggctctcttcctctgcctttcgctgacgaaggctcgtgccctgcaagccctgatatctcgccgaggttctttcctgccgggccagaccgcaaccttcccaagtccacacgcactctgcccgccgcgacatggccgtcgccaactgctttggccagcgattcgccgcgctcgcacgacacccgacccgacttgagcaccgcgcgaggccgctcgcatgccagacgcgggttgcgctcgtccggccgaccgctaacgttcctttacacgatttcataatgacgttgacgagaccttgcacactgatggcgagagcctctgcacggattttgcgcactgacgcactgatgggaggcccagggtcggctcgatagacatcgtctcattcgggccctcgcgcagcaagcagcgacggcgcagcggaaagatgaggagactggacatgggtagagacgaaaatgaggacacaggcgtcggcagggcgttcacgatagtcgagggaggttagcggtcgaaggcaaggtctggagagcgagcggagggaccaaaacgaagaggtcagcgctgctctcgaacgacaggaagggcagaacgcgggaagaggggggtgcgaggtgaatcagaaatgtcgagtaaagccatcggcccagcggtgcttgtaaccatgcccgaaggcaaggacacacactgggactagaataagaggtgccatgcgctaaatgcgactcgtcatgcgtccggagggagggagggtcgaggctgaggtagcgagagactcaccagtcgaagggggagccggtcggcggtcgagtgtgttgtcgaagtcctgacacgggtagagcttcaggcctggataatgtgcgaggcggcgagcgatgctgatggcggtcgggagatcagtgagtctaggggtcgtttcgaaacttgaggcggccggtcggagctggccggcgacgcgcagctttcgctttcggctgccagagcggcttcctcgcccttcagaagctctgcagcagaggcaggacctttagctacgagatctccggtagccggtgatacgctgctcacgtcgacgaaggtaggcgactgatgaatgacaagccgaccgtccctctgacgtcgcgagagggtcggtttaagagtccaaattgaaagcggccgggttttcgagaacccaggccaacacccccgacgatcgggcagccccgggcctaaccgccagacgggcacagaccttgccccgagctcctcagcagacctttctaatctcctcaccctcctcgtacgtcgcagtctgtgccgcctggtcgcccgtttgactggtacgagtagcgagctgacaaaccgctgttctcacgcttttctctggctccgatcgacccctgggttgccctgtatctgtgctccctccgctgctctcgtacgacctccgcctcctggtcacctgcacgacctcacgtcctgctctgcgcttgtcttcgacgtcttgtcgaactccccggcaacttccttccccttgcgctcgtgcccgcaccgacctgctcccccctccgcagctcaagatgtctgccgtttccgccgccaacatctccaagaagcgcaagttcgtcgccgacggagtcttccaggccgagatcaacgagtttttcactcgtgagctcgccgaggagggttactctggctgcgaggtccgcgtcacgcacgcccggaccgagatcatcatccgggccacgcacacccaggaggtcctcggcgagaagggccgccggatccgggagctcaccgctctcgtccagaagcgcttcaagttcgctgagaactcgctcgagctctacgccgagaaggttcaggcccgcggtctttcggccgtcgcccaggccgagtcgctccgctacaagctcctcggtggcctcgccttccgccgcgcgtgctacggtgtccttcgcttcgttatggagtcgggcgctaagggctgtgaggtcgttgtctcgggcaagctccgtgctgctcgtgccaaggccatgaaggtgcggcgcgctcctgttcggttcatggccgcgcgcgctcccggtggctgactgtccctaccttcttccctcccttctgcagttcaccgacggctacatgatccactccggtcagcccgcccgtgacttcgtcgacgaggccgtccgccacgtcctcctccggcagggtgtcctcggcatcaaggttaagatcatgaaggcctgggaccccgagggtcgtctcggccccaagaagccgatgcccgacgccgtcatgatcctcgagcccaaggaggaggccgccgtcaccatctcgtccgagaacaagggcgtcccggcccaggccccggccgccgccgccgaggcgccggctcaggtcgaggtcaacggcgagacctacaccccggctttcccttcggatgagcaggctcccgtccaggcttaaagcttgctcactttgagctgctagacgccaaggacggacctttgtgacttcttacatgacccaaaagcacaaaacaaccacggcggggctggcgagtggggtacggcgctcgcagtcggtcgagggcaaaggtgaaggagagggcgagctcagccgggggggtatcatcaatcgtgcgagtgggagcgtgcgctgccggtgtgtgtgggagcaaaggccggagcttgcggtaagaggtgggtcgtaaagtcggtcggtcggtcgattcgtgggtatggagagaaaggcgtcgagtctagccgagataccaccagatgaggccaaagcagatgagcgtgacaagcgcgccgatccaaaagatggcggcatcttgcttcctgcgaaagtggagcgaccggcagggtcagagcgtccttctgcttgctgcgcgaacagggtcacaaatacacgtacgtccgtcgctcgacccagccgatgacctgccgcccgcccttgacgccgttggcggcgctcagcagccttgtccgcgtcgccttgagccagccgcgctgctcgaccaggctgccgagaacctcgcggccctggctgatgagcgcgtcaagctggctctcggcattgttgacgaaggactcttcgcggagcgcatagtcggcgttggtcgacggcccgccgtgcgggttgttggtcgtccactgcgactgatacggccgcgggttgttcggccggaaggcgaaaggcgactcgtgcgtcggtgacgagggcgggtaggacgacgagccggacgctgccgacacggatgaacggaagcgggaaccggcagacgacgacgggtcattaagcaatgaagctcgggccgacgatgcggcctgccaggcgagcgagaggagacagcctcggcgtcagcaaggtcgcctaccggaggcagcgcaggtcgaagccgcacctgcgtcgcctggtccttcttcagcacagtgaaccgctcgcggagctccttgaactctttccggaacttggtcacgcggctagcaggtacgaggatggaaggtcagtctgagtagagctcaggcgagcgctaggcggcacagaaccaggcactgctgccttagggacgaacatcagtgccttctcctgcttagccgagatgagctccttcttggccatcgactcaaagtcgtcgatcgtccgagacaaggccgctattgacgcagcaatctgacctgcgagtcggtgcagcgcgtcaagggtcagctcccgagagagcgctctgagccgacggacgaggcagactgaccctggagcgaggccgacggacccgtcgccgacgccatggcgtcgaggtcggcgttcaagctgccgatctgccgctggccgtgcgagtagagcgagttcatggcgggccgaagatgagtctaggtcggccggctccctgttcgtgcgacctgcagggcgagcgagggaggcgagatgtgctggaggtcgggaggggtcggctgctggtcgtcggaggcagcgtcggcgcgcctgccgcttcgtgctgctggcatgcgcgcgtgcactcagactcgccgtcgtacgtaccaaaggccgccacttgttcatcgagctccgctcggctccgctcgggcgatgccgtctgttgatgtcccgcttcttcagcgagctattgcaaaacagcggtcatagagcggtactgatcgaggcgaaagcggcgacacggaactcggcgcagcagtgcagcctctctggtcaacctagttccttgcgagaagagcatgatacattgtggaaggagagggagccagagagggagcgagcgaatgaaaggcgggtgcgtgctaatggatgcgtacaagatagatcagagaggtttgctcgaggtcgagtgacccacgggccggccgcggcagcaacgaccggaagaaggaatgcaaagacgcgaaaggagtgcagcgagcctagggcctaggaggaggttcgtcagtgagagacgaaacagcgccgcatcgacggatggcttcagacgccgcgccagctcgggatctgcgtcttattatacggccggctgggcatggccgaaagcggcgcgggcatcgtcgtcggcttggtgcggccctcaatccggtctttgaagctgcctgaacggacgagacgcgtggcggagacattcgaggactgaccggcctccttgcaaagacgggacggcgtttccgggcgaatctggtcgtgcagaggcgactggagccgctggagggcgttctgaatgatgaccgctgggatgctggccgtcgcgtgcgagagggtgcccttcgagcgttcgatggcgcactcgagccggtgaaggcactcaatcgcagggacggcgcagacggtggccggcgtcggctgcgagctgtccaatggctggcgggcgagggcacgcggctccgctgacatcgactcgggggcgtgatcgaccttgagcgatggccggcggacgagaacctgagcctgcaagattgttgcaggagagtcgcaccggatgcctgatgataccgagaggaccgacgtccggaggcggctgggggtaaatgcagtgagcgagtcgcggggagagtccctcggcccggcaataaaggacgtgctagaggcagtcaaggatgagggtgtcagggcgcacgctcttctttgaccccggattcagacgcacacgtcgacgtcgtctccgcggtccagctctgacttgcggcgttcgggcggctgtagcgagtcggtccgctgaccctttgacttagtcgaggtcgcaagccgcaggtcgaggtcggcccctccgagcgcgaggccgatccgggaaacccgtgtcgagacgaggaccgacggctctggtgtttgctccagaggaggcgccgggaacgaatcgaggtagaatgaggcaatgccggtggacgactggcctgaggcggacgaggcgagcgtgctcgaacgacggagggtcgactgctgagatacgcgaacgacggcctgagggcgaggcaggtgaattgacgacatgtcgcgtgacgccggctgtgcgaccgacgcttctccttcgaccggcgacgagccctcgctggagaagctctgcgtcgggacgctcgccgtgcgcaggctgctcggtgcgtagagtcgcgctggccggaatgcagctggcggcgggtgttggacggtcatgagaggcgggagcaataggttgcttcccctcgtcggtggtgcggatgagtctccttcgccgagagaagaaggaaagccgccgccgccgccgatgaggtgctcgccgtcgtcctcgctcgttcggcttccgctgccgactccacggagcgtcgagacggatggaagctgaggcagcttcgggcgcgatagccgctggccgctcagccgcgtggagtttccgaagcgggtcacgcttgcaatggacgatgccgaggagggtgagaagcataggtcgtctgcgtttgcgtttgtgatgcgaacgacgccgagggttgtgtcgagcgggcggaatgtcccgtttgagccgagcgccggtgttgcatggcgaggcgtccagccgtcaaggtcggtccgaatgctgagcacgggcgccggcgagggcatccgatggtgatggcgtccgacgagacccgccgtcagcggcatgtcgaggtctcggccgagcgcattgcgcggggttcgaaagtcgcaggattcgcgggtagaaaggccgagctcgacgtcgaacatccctggcggcgagccgacagtcgtctccaacgaagctcccgacgatgccgacgaaggtggcgcgagcaggtgagggacctctcggcggagccagttgcagagcccgcccgaggaccgcttcgctggcgagggatgccgtgggacgctcgtgctcggcccggctgcaccgtcgttgagcccttccgagcacgcgcgaacggcagccaggtgcacgagcacggcccgagagacggtgtggacgtcgcgggctcgatacgagatgacgagatgcgagacgccgagcacgtagaggtcggctacgcggaggaagcgaccaaccggcgtcctattagcgccacggaagggcggtcagctcagcgtgtacgaggacggctaggaaaacaggagcgcactcggagaaggatgctgcaagtcagtaggcgatgccgctgtcagacctctactcctgcaggacgcccgtattgagacgtaccgatcgccaggccagcaccagcgacgccgactccaagagcaagtccgacatccgggcccgccagctcagccagtgtgcccacaagcgagcagcgggtcacgcgcgcggtcaggcgggccgtcgcgaccagcttgagggcgaggagggatgagagcgcgagctggaggacggcatcggcggtgtagatatcgcgagcggctggaagcgaggtcaggaagccgatgcgccagacgcaggactgcaagcaagggttttgatcagcgcctgagcaagcagggatgagccttggctgacaagagtgagacacacgagcaccatgatagcgacgaggagggcccacgccaacgcctggccgacgcgcccgcctacttctcccagccatgagcgccattcgcccgagtgtccggcctgccttaaagcagagccatcctcgtcgacctcttcgtcgtcgtcaaagccgctcgtgagctccttgcgctcgaccgcctccttaggcgctcccgccgcgagagcggcagtcgccagcttccgagaccaggcctctcgggtcggacagcggctggcgacgaggaggaggaaggcgaagcggagggcgttggaagtcgcgaggagaagctgcgtggcgatgacaagcggtgcggccgatcggttcgaggcgcgcatctacgtgtgcgcagagagggcgtcagaatcatgagggagacgtgggccggagagagaggagagcgcacgatgaggatctgcgaaaggtcgcagacggctgagaagaaggcgagcaggatggcgaggacgatggagagctcggctctgggcggacgtaaggcgtgttctgtcagcctagcggcggacaacgacgcaatcgactcgcgaaggtcaggtacaggacgcacctgcccatgccaccgctgcaggcccagaaggtgccgagggcgaagccgacaaggccgagcgcgacgagcggcgcgtcggccagcatcacctggatggcgaacgcgcgcgagagggtggaccacgccggcgcgtcggtcgcgagcagtacgtatccgagctggctgggctcgggcaagaggttggccgaggcggcgaggaaggacattgctcgaccctgacgagctgacaggactcggcctgcgagcctgggcgtcggtcgacgcggcgcagctggagggtgcgtcgccctcgcagacggacgcgagcgagcgggaggagagagagaggagaggatggccagccgtcctctgaccaagcgttggataggcgtgcgttcgtcgaccagcgagcggcggttgacgaaggaggcaaacgggaaggggtcagatgagggagggctgtggatgtcgaccgtcaagctcggtcagtcggccaggcgtgtcagcagcctgctggcgcgcgcgatccctctcctgtcgagcaagacgcgtcgacgcgactcttggacgaagggtgcctgggacgtgccttgctgctgctggtcgtcgtcgactgctagctgcagcagccggcacttggcaggctgccgccgctgtttggcaggcctcgaccccgcgtgcggggcaggctccgagtagaaccggcgcgggccttcggaggcaattaagacccggggagccgccgtagagagcaggagacggtcggagccagcaccaccgaactcgcccttctctcgcccgacccatctctctctactcttccagaccatgtctacctcggccgtcgtcgtcgctaccggctcggcccagccgtcaacgtcgtcgtcgtcgaaaaaggtcgccaagcgcaaggtcgaggacaacggcagcgacagcgaggccggcggcagcgcaaagggcaagcgcaacagagtgcgtccctccgagcgagatcgacagtcgtcttggtgcctgaatgtacgacgaggtcgggacgacaagactgacagtgttcgctctctctaggtccactttagctgcgtcgagtgcaaccggcgaaagcagaaggtccgtccttcttcccatcggtggtctcgttgccggcggcagctgccggccgatccctctcgtcgtcccgtcgtctgaccggcccgccttcccccgtcgaatgccgtcccttcttgcggcaacgtcctagtgtgaccgacagacgccgtgctcgcactgcatcgcacgcaaggtaccgcacctctgccgaccgttcgtcaatggtgtcgaggacccgaaccagtcagtcgctcccgctcctcggctcgccgcgccgacctcccgaccgacgacgcccaggcgcgcaagcgttgttgctgtcccatccacccctggtctgacctcgagcgtgctctcctccacttgccgtcctcagctatgagcaggacgtccgctcgcgactggatcgaatcgaggacttgctgaaggaccttcgcgacgcctcggcggcccacccacacggtcaaggggccatcggcggaccctcagcctcgtcgtcgtctcacccgggtccagctcattatctcccgccgatcaacatcaacggccggtcgtcgtcggccgtgccgtcgtcggtctcgcctcgagcagcggcgatccagccgctgcggttgagcttctcgggcagcaacgcgagcgatggcggccgtggaggtagcggcggcggcggcggcgagggcgaggacgaggatgacgaggacggccagatgggaacgatgagtggcggccgcttctacggcccgagcgcaatgagcagcgtcagcagcagccggatgaacaagattctgcaagacgtgcgtccaccgctcctgctgcgcgccatcctgcagactgacccacccttctcttcgctgccagttcccgacgacctcgataggaacggcctcgctttcgcttcctctaccctctccgacccttccctcgctcccctcctcggcgtccaacaccggcccgacaccgtcctctggccgccaccggctctacccgccgggttcgctcccgcccaagttcgagagcgcgatggacattctcgacgagagcggcatctccatggagaacatcatcagcctgctcgacaagctgcccgagcgaggcgtccgcaacgcgctcgtcgaactctactggcgcgagatcgagtgcgtgcccggccactctttctcccttcgccagtccaaaactgacgctgcttgaccctttgtccgcgcttcagctggacgcggtacaagatctaccagccgtccttccaggcgcgctacatccacttcttttcgcacgagacggagcagaatcttcagcatgcctacccgtggcagaacctcgatgcggcctcgctcaagtggctgccgctgctgttcatcatggtcagtaatgtcgacccgcttcagacaaccttcacgctcgatcccgctgacagtctggctgcttgccttcgcagatggccatcgcaacgctcacagccccgctcagcctctttggcgacgaggacaagcggcggagcatgtcgcgcaagctgtatggctcggcccgcaaagcgatgaatatcgcgcaggcgcttcagcgcgacaacgtcgacattgtcatggccggcctgctgatcgcgcgatacctgtgcgtccgcgtgctgagcgctacattgcttaggtcgtctttacgctcgttagactgactctgactggcctctgtcttcagcctgctcgtccaccgggcggccgagggcttcacgccgctgacggccgcgctccagctcggtctctaccgcgacggcagccaccttggcatggcggacaagcgcgagattgagctccggcgccggctctggtcgtacgtcttccaccacgaccggacggcttcgctcctcgtcggccggccgacgctcatcccggagagctcggtcgacacacttccgccggccaacttggacgaccacgatctgctcggcgactttcctgtcgagggcaagccaatgagccagccgacggtcatgacgcatgcggtcggtcgccgcggatctttgacagcactgctcgctgctcgagactgacctttgcttacatacatgcaggtcctgcgccacgccctcgccgtcatcatgggcaagatcagcgacaagagtgcgtgctgtcgtcgcggccccttgacgcttgctcttggtcgcccagctgactcctcttcccgcccgctgcagtcttctcgctcaagtcgccgcgctacgagacggtcgtcgaactcgaccaggagctcatcgtgagtctgccttcactggtcgcctcttccatcggcgctcacaaacttatcctcgccattgtccactcgtcaggcttggaagcacgaccttccctcgtactttaagctcgagcaccccgacaagtcgatggacaaccagtaccactacctcgctttccaccggcagatgctcgcttccgagttctactacacgcgcatcctcctccaccggccgttcatcctccgccggcgcgactcgacgacgtacgactactcgcgccgagcagcgatcgaggctgcccgggccgacctcatcggccggcgcgacttccagctcaacaagccagcccacctcggcaagctgtcggtcgccgcctactgggtgctcaactcgtacatcatcatcggcatcgcgatcctgctcgacccgacaagcagtcaggccgaggagctccggaacctgctgaacgtgcgtccccagacgcgtcgccctccgaccagcgtgacgactaaattcctcggcttctctcttcgcaggtcgtcaccggccggacgcccgaccaggacggccgcgtctcgatcgcgaccgtccgcgagctcgccatcgtcgagctcttctcgcaaaaagagaagaacatcaactcggcctcgctgccgtcgtcgccgacgaactcgggcgcgcaggcatacccacacccgcccccgctgcagatggagccgacctcgtcgccctacgccggcccgtcgcagcccttcaacctcggccagaacaggagcccgggccagccgcacaagacggagcgtcaggagcacgacttccttgcgccacctcgtcagaactcgatctcgtccaacggcggcgggcccgggtcgagcctggcgtcggcgagccggcagacggccagccctggtctctggggccggcccgacccggtcgatgagctcctgctgtcgtaccaccgcgccaagggcgacggcgagtcgtcgaacgctgcgctccagagccagatccagcacgctgccggcgcgggcagccgggcggcagcaagcgactcggcctggtcggccaaggcaatcggcatgggcgaccacaagtttagccagccgtttgcccagtcgccgcactcgctcgcctcgccgcaggcccggccgctccagcctgcgccgggcatgacgttccagcaggcttcttactcgctctcgccgctcgcgtcaacctcgcgctcgcagctgccaacgagcccaggcgtcggcggcggaggcaacgtcaacgcctcgggcgacggcgtctttggcggcggccttggcgggacggcgttcgaccagatagactttacgagtccctggacgcacggcgtccacgccttcacgggcgcgaccggcgtcgtcggctcgactgagtcgcccgaggccggcgacggctttggcgacctgctcggcgacgcaaaggagattgccttcctcgtccgtccctcttcccccttcctgcttgcctcttggaagcagtcggctgaaaaaacatctctgcctcgcgccctcccgcagaaccagctcatcagcgccatctcttcaggcgacgggccgagtctctgacgaccgagggcccgtcaatctttatgtccttttgtctactttggactctgttgaccgccatcagatcgtttcaggcgtgcgcttgagaacgaactggtagtagccgaagccgacgccgtcgccgacgtctttcactgagaggtgccagccttcgcgcgtgaggtagcgcttgcggaagtggggctgcgcaaatgttaggtagatgaaggaggacgtcggcccgggcttgaggacactgtcggtgcgagagcggcgagacctcggtcagtctggctgcgtgagggcagtcaggaacgagagcgtgcggacgcaccgcaggacctcatcgacctcggcgttgcagttggccacgacctcttctgacgggttctgcgagggcgcgacgcgatatcagcgacgagcagtagagaccagcaagcggccagaagctcgacctacccaaacgtctcccttggctgtgaccatggcgctgcgcggacgacaagacagcgtcagctttcaacgcctacgcagcgcgagcagacgtgcgacctactccatcgtgcccttgtcgagggcgacgtctatgctgcccgactcaaatttgaggtcgcggatgtccatctcgtgccactccatgcccggccgggcgtcgccgtgcttctccttcatttgctcaatgaggataccagagtactgaagagcgcatatgggaaggaccgagcaagccggccggcggtcagcctccaaagcctttcctgcgagggagagccaccgcaacgaaggcgcacgtcaatgttgacgatgttcgtccagccctggtcgtacatctgccaaggacaagagagggccgccaactgtcagctctgggctgcatgagggctcgctgcgggagccgttagagcctcacggtctcgctcagagcggaattgccgcagccgagcatgagaattcggctcttcttgtcgggaatgagttcggtcctgattaaaagagaccaagaggtcaggggtctcgaagggcaaggttcggacaaatgcgacgcacatcaggggcaagcactgctctggccgcaggaaccagtcaaacgccgttccggacgtctcctgcttgtagcgctggtcccaatactcgcgcgtgccgtactggtcattcgactcgggcaggattgacgtgtcggtcgaatagtttggagccgacgacatagcgggcggtagacagagctcgttgtggttcgaaggcggcgagcgagctgagctctcgaaggcgcgacagcatgctccgtcgtcctctgcccttcgacgacgatatctgagcctcctccctgccgctctcccgaccctcatctctgagcttgccagtcgcagcgtgggagccatggcgcctccgcatatcctcaactggctcaagcaggcggccgccaactatgtctacccggccgagacgattgcggccatcgcgtcggccctcgaccggtacccctcgctcaagatcaagacggaccagtacagtgtgtctggctgatcagacctaaagctatgacaacggcggccgagctgacaggctcgcgcccttgtccggccgactcagccttcgatgacggccggacgcttctcctgctctgcctgcacgggacactgcccatcacctacgcctcggcccggtacaacgtcccgatcgccgtctggctcccgctcgactcgccccggagcccgccgatggtctacgtcgtgccaacgagcggtatgctcgtccgcaagggcaagggtgtcgagctcgatggtcgagtcaacgaagacgactgggactacctgcgcggctggcgccgcaagtgggaggttcgtcgccggcgccgccgtcaaccccttcatctcgctgactgtcctcgccattcgctctcaggcccactcgatggcagcgctgctgcagtcgctaatcgacgccttctcgctattcccgccggtctacgccaagcccgcgacctcgtcggccgtgccttcatcttcctcttccgccccggctcgtgcgcagacgtcgccgatgccctcccgagctcagcctcaatcacctcgggcgtcgcatcacgatcggaacggctcagaggtgcggaccgttattctcttctcggctctcggtgtacagggtcgctgactttcgcggccgcttgtgtccgtctgggcgcgcagcatctgccgcaatatacgcgcccagcctcctcatctggccaaccgccccctcctcctccccctccccccccgccactgcctccaataccgggacaaagcggatgagatcgcaagggggggggggctaagacgacgagcgccagccttggtctgcctgcccgcccatccatccatccagccggcccgcatctcgaagcaagcgcgccgacttgcaccgcccgtcccgcaggaagaagccgcgcgagcgacgaacgcagcgcagcaggggataggaaagcgactctcaagcaagcacgagaggaaggcggactcactcccgccaaagccagtaaccgtctcgaacgcgcctgccgcgccagacgtggcagcgccaaagacggaagtgatgccttcaagcactacgtccggccgggcaaagacggcgtgagaaggggaatgtcagcttagcgggagcaggttgaatgaaggagtggggagaagaacgaacgctgcctttcttcgaggttgttgaccgcagcaggcgcagcaatggccgaagagcctgcgagggcgagggcgagaagtccgaggttggagtaggtgcgcattggagagggatgtatgcaggaggtgatggttggatgacgaggggaaggggggggggcttgcgaaggctcaagacgggaggcacacgcctgcgcgcagcagccgaggaggaaggggtgatgtcaccctgagttccgcagcagcacagccgacggccgcgcattgggcgaggctgactgcagtctcaagagagaacccgtcacgagggcacagtagtgaaggcggacgagcgagcgccggcgtgcgaatcggtgacagagacgaaaggatgaattggattgttaattcgccgccgagatgaagacaaggagggcgatggctggaaagcaagggcgggaaggaaacgcgcgaggcgtcgcgtccaaagtcacgcgcggggaggcccggccaacccacagccacggcccgcagcccgcttcaggcaggccactcagcccagcagcaggtggcgtccgaccaacagatcacacgaagcgagaagggcctcttcggcagcagagcactctttcattcttcaatcaaaactttgctcgcagcgtcgacgtgcgcaaaccttcgcccggaccggactccccggcgctcataccgggacgcaacaacgaagaggcgctttgaccgcgaccgtcatgttcccttgtcagctgttggtctacagcgagagaggcgtcgacgggagagcatcgaccgggcgaacagtgaggttggcagcaggtcaatgccgtcaaaccgcaagccgaacttctccgttgaggcgaatgcaacgcttgccatcttttcatgtgcgctctcactcgacggcgggaggaggtcagctgcgagagtgtcagtcttgaccagggcgtggacgggaaggtcgaatgagggcaaagagagctcgtcatttacatcagcgctctctctgctctgccttcgttcctcgatagaccagctccgttccccgtcgtccgaggagtgcagagctgtgtcgaagcagccgagaagacgtgagcgggcgacacctgagcaaagccggctgctcgacctgagcgacgttggcggacacagggcgacatcgtctcacagcgagtcgcgaccgtcgacgcgacgtgcccatctgctccttccactcggacgaccagacgtcagcgttcgtccgcgagcgtccctgcagacgttgcgaggggaaggcggacgacgagtcagcatggacaacgactgtctgggctcgtattcgtgggcgataagcgtattcgtaaaagcaccaggcccggccggaatgggtgagctggctcttcccccttctctgcccttgacctgagcgccacctgtccagcggatatgtagtcagccggccgtcagcagatgagagagagagagagagagagagagcttttgctagggaaggcgacagttcggagggatggagaaaggaaggcgggctgcagacggttcagtctccgacaagttcgtccgggcgagagcaccactttcgctttctcggtgctgtcgtctcgaccacacgcccttcttttctcgacttgtccgcaccagagcgttagcgcccccggaacgcccatgcttcgctccttgacctccgcccaccgcagcagctcagccctcgcccgagccgtcgccccttcgcccttctcgtcgctcgcccgcccgaccaccaccctctttaccaacacccgccgccggtcaccgtccagcagcagcagcagccgacccctagccgccgctacccgtcgcccgtacgccatgtccgcacccgtcgccgccgctaagcccatggagggcgtcgagggccaggccgcccagatcattgacggcaaccagcttgccaagtacgtcgtcctctcccgtctttttcccagctcgcgcttgttctggcgcctagacgactcgactcgagcggctcgggcagtagtttcgtcgcgtccttccctcagcccagtcgcgctgacccgctgcctcctcttttttcctcccgctctaccagggacatccgctccaagatctcgtccgagattgcggccatcaagtcgacctacccgcgcttccagcccaacctcgtcatcctccagcgcggcaaccggtccgactcgtcgacctatgtcaagatgaagctcaaggcggccgaggaggccggtatgacctgctcgcttgtcgccctgcccgagacgtcgaccgtcgaggaggtcattgccgtcgttcagaagtgcaacaacgacgacggtgtcgacggcatcctcgtccagctcccgctcggcgagggagtcgactcggacggcgagcgccgggtcgtcgagtcggtttccgaggctaaggacgtcgacgggtgcgtcttgatctcgtttcggccctgaccggccgaacaccccgagctgaccctttcttcgccctctagcttccacccgaccaacatcggccatctctcgtctcgcctgacgacgccgatgttcacgccgtgcacgcccgccggtgtcatcgaccttctcgacaaggccggcgtcaagatcggcggttcgaacgtgagtctgatggacggctttcctctctcgttctctgcgactgaccgaccctcctcccccaacatcgcaggccgtcgtcctcggccggtccgacattgttggctcgcccgtctgcgcgctcctccgcaagcgcgacgctacggtcacccagtgccactcgcgcacgcagaacctgcccgagctcgtcaagcaggccgacatcctcgttgccgccatcggcaaggcccagtttgtcaagggcgactggctcaagcccggctgcgtcgtcatcgacgtcggcaccaacttcatcccggacgcctcgaagaagtctggccagcggctcgttggcgacgtcgactttgagtcggcctccaaggttgcctcgttcatcacacccgtccccggaggtgtcggcccgatgacggtcgccaagctcatgcagaacacgttcgagtcggccaagcggcgtttcgaccagggccggcagcgcaagattgtccccaacccgctgcacatgctcgagcaggtgccgagcgacattgtcattgcgacctcacagacgcccaagccggttgtcgacattgcctcgtcgatcggcctcacgcccgatgaggtcgagtcgtacggcaagtacaaggccaaggtcgagctctcggtcattgaccggctcgcccaccggcgcgacggcaagtacattgtcgtcgccggcatcaccccgaccccgctcggcgagggcaagtcgacgacgacgatcggtctcgcccaggcgctcggcgcccacctcggcaagtcggcctttgcctgcgtccggcagccctcgcagggtccgacgttcggcatcaagggcggcgctgccggcggcggctactcgcaggtcatcccgatgaccgagtttaacctccaccttaccggcgacatccacgccgtcaccgcggccaacaacctgctcgctgccgcgctcgacgcccgcatgttccacgagagcacccagcccgacaaggccctcttcaaccggctctgcccggccaaaaagggcgtccggacgtttgcgcccatcatgctcaagcggctccagaagctcggcatcgacaagacgaatccagacgacctgacagtcgaggagcagagccgctttgcccggctcgacgtcgaccccaagacgattacctggaaccgtgtcctcgacgtcaacgaccgctacctgcgcaaggtgacaatcggccaggccccgactgagaagggcctctcgcgcgagtcgggctttgacatctcggtcgcgtccgaggtcatggccgtcctcgcgctcagcaaggacctcaaggacatgcaggagcggctcggccgaatggtcgtcgcgacctccaaggccggcgagcccatcacgtgcgacgacattggcgcgaccggcgcgctcgccgtcctcatgaaggacgccatcaagccgacgctcatgcagacgctcgagggcacgccggtctttgtccacgccggaccgtttgccaacattgcccacggcaactcgtcaatcatcgccgaccggatcgcgctcaagctcgccggtaccgaggagggcgacgacgctggctcggccggctactgcatcaccgaggccggctttggcgccgacatcggcatggagaagttctgcaacatcaagtgccgcgtctcgggcctcaaggccaacgccgtcgtcctcgtcgcgacgattcgcgcgctcaagatgcacggcggcggacccgaggtcacgcccggcaagccgctcgccgagacgtacctgaccgaggacctcgagacgctcgagaagggctgtgtcaacctcggcaagcacatctcgaacgccaaaaagtacggcatcaaggttgtcgtcgccatcaaccagttcacgaacgacacggccgctgagctcgcgctcgtccagaagtacgcgctcgaggccggcgccgatcaggcggtgccctcgaaccactgggccaagggcggcgagggcgccgttgagctcgccaacgccgtcattaaggcgtgcgaggaggacaacgacttcaagttcctctacgacgtcgagcggccgatcgccgagaagattgagacgatcgcgcgcgagatgtacggcgccgacggcatcgacatctcgcccgaggcacaggcccagatcgacacgtacacccgccagggcttcaacaacttgcccatctgcatggccaagacgccgctatcgttctcgcacgagccctcgcgcaagggcgtgccgaccggctttacgctgccgatccgcaacgtccgcctctcggccggcgccggcttcctctaccccctgtgcggcgacgtccagaccctgccgggtctctcgacccgcccgggctactacgacatctcgctcgacgacgagggcaacatccagggcctcttctagagctctgcgcttcttttcgttctctttctgatttcttttggacccgctgcatggtacgccggttctgcccctcgacctgtctcctccctctcgccaaccgacgctgacttccctgcccttttgcctcaggcatcaactgtctcaaaccaacccgcatcttccgacctccctgtgttaaaaaaccgcccctctcaacgaggcgctctcccttgccattcactagaccttgtacaggggcagccccccgccctcccgcttatagatgtgcgcgtctctccgctttctcttatctaagtcagcctttaagacaggagcgtgtcagcgaccggagactaccctcctccgtcgcgcgtcaaagcccgcagtcgagatttcctcgcctccgcttggccggcgcagaagccgtcgctcctccgctttcgccgctctgccaagaacctccgacctcgacctgccgctctcgctcgctttcccctcctcaggcgcctcgctttcgagacgctctctttcgcacttgtgagtcttgcttgcctgctgggccttcaagctgtcgccacggcagcccacgactggtcgctcggcctcagctgctcgcttgctgaccgtcattccgacctcgctgctccaacccctccctgccagcctcctccttcctcctcgactctcaaacagacagccatggctcgcggaaaccagcgtgagaaggcgcgggaaaagaacgagaaggaaaagtgcgtcgttttggagatgattgccttgcgtcggcccgagcaagctcagcccgttcgagactgacccttttcccttcggtctcgccgcccctttcgttgctgctctggtcgctcgtccgacagggctgctgccggaaagaagctgacgggaaacgtccagcagcgtaatgaggccaatgctgccgcccttgccgccaagattgaggtacgtctgccgggcgacgctggcccgccggccgagcccgagttgacgactcggcttcctcctgatccgctcactgctatgtaggccaagaaggctgccgccgcccaggccgccgaccccaatttcgtcccgccgaagaagaagtgaggctgcgttggcgagctgttgttagcggcgaatgcacaagggcttcctcaggcttctgggcgagcgtccgtcggccgaggtgtgcgctcgagagcctcctcaggactgtcgtgcacttagagcatggcgtctctctgatgacattacgacatacgaccgagaggccttgcttagaccaggctgctcgagtctgacggatggagccgagcggaggtcatgtatcgctgggcgagatcgcttcgctgacccgttttggagtctgttgcgctctcgggcgcctcatgcgtcgtgggtctcccttggttggatcgcgcaagtcgtcggccgccatctcaagtttgcgcgcccgcaaggggtacgcctcctcgtgcagcgtgttgctgtgaaacttggcgggcgtcggctcttcgtacgagaagccttctttgctcgtgagctcgcccgggatataaacgacgttcggaggcaaggcgccgcctggagtgccccatggcgagggcttgtgagctggcggggttctttgggcaagctgggccgcgcggcggcggcgattatgccggatgtcgtacgcttcgaccatcacgcgctgctcaacgtccgagagcggaaagccggccgcccgcatctcgtcctcgagttcgaccgatacgccggggctgtccgacagggcgtactcgcgaatcagacggacgtagagccaagccgtgacgggcgggaactgatcggccgacccctgggccgtgacggtcggccgccggttcgcggtgtcccgggttacgggcgagcgcacatcctcgaacgagatgccaccctgccggataaggtcggcaaagctcgcccttgcctcgtccagctcgcccgcctggatcatgctgacgaggaggtggccgtagatgcggcagtcgtgcgagaccgcccgctggcgcatgtcgcgcaggacgccggtcgccagctttgtgtcaacccgagcaaaggcgatgagccaggtcgaccagacggccggcgaaggacgctccgactcgggcaggtcgtacttgacctctggcgcggaccatggcgtgaagggtaccgcagcctctgatgtcggtggctctggcaaatcctcgaagagcgatgactcctgctcggccgcggaggtagcgaccgtcggtccgcgcggcgacggcggctgaggggccgggtcgacaaacgagaggaactcgcggtagtcttgcgtcaagagctggacgtcggggccgtgcatcttcacgatggcggagtaggcgacctcggtcaacttggcgcccgcgatgagtttccgcttcggatcgtagactagggacgggcgcccttctgcgatcagggtcgcctgctgtggcggtagctcaggccgg
